United States Patent Application Publication US 2018/0223336 A1 - sequence listing, part 2

SEQ ID NO: 1 - DNA, 3799539 bp, Morganella morganii subsp. morganii KT (residues 1,899,771-3,799,539 of 3,799,539)
  misc_feature (867406)..(867406): n is a, c, g, or t
  misc_feature (1380998)..(1380998): n is a, c, g, or t
  misc_feature (1498246)..(1498246): n is a, c, g, or t
  misc_feature (1499005)..(1499005): n is a, c, g, or t
  misc_feature (2881279)..(2881279): n is a, c, g, or t
agtgtgattcctgccaggctatcgcagccagtacctgccagtccattttccccgcgtacttttcaaacagcgggcggtaagtggccagttgggtgttgatggcattaataaaggttttggtatccacataattaaactgattcatgtggctgaaatacttctcttccagacgcgccagggtgtcggtttcccgtgtctggttgaaaaaatcgagcagggcggcattcaggctgctgtcttcactgcgtttcagataccaggtcagcggctggttttctgtgacctcaaaggccaccgtgacattcggatgaatatgctgttcctgtgccacgctgacagaatcgctgacgacataatcaatctcaccttttgccagtcgctgaagcagatggctgctgtttttatcggcaatttcacggatatccagatccggatatttatctgctttgagctggcggagcaggcgggcgtgagcactgccggctgtgacccagaccggagagccgagatcgcccaaatcccgcggacgtttgttacccatgcggtagagaagctgctgtgcgacggtgtaatatgtcgggccgctcagcgcgttgtccaggcggtcttcattatagataagcccggcggcgagcagatcggcatcattattggcaaggtcgctgaacaggtcattgacaccgtcgcgttcccgcaccaccagttttaccccgaggtagtccgcgaaacgctgcgccagttcgtaatcaaaaccgctggcctgtccctgcttattaaagctgataagcggtgatgccactgcgctgacacgcagttccccccgcgcgagaatacggttgagctgcggctgctgcgatggccagctgatattgatggcgatcagcgccgccgcgaacagcgcgacgacgacgataacgacataatttagctttttatgtaccaaaggcgcatctcaccggttacacaaaaggattcattctgaggcataaattaccatggttatatttccagtaatcggacattttgctcaacattttgtcactgtgcaactttattccgttttccggggctgaaatccggaaaaaatccccccgggaaaaaacgtcacgcaaacggtttcgtcggcgtcagtattgctctataatgtgcccgtttcccctccgggccgatggctctgcgtgttaaaaagagagaactgacaactatggaaattttgcgtggctcacctgtgttatctgcgtttcgcgtatcaaaatttatcagcgcgttcactgaacaccacctgccggtgaccaacatctatgcggaatatgtgcattttgctgatctttccgcacccctgaccgacgatgagcactccaaattacagcagttgctccgctacggcccgtcgctggcggaacatgcgccggaagggatcctgtttcttgtcacgccgcgcccgggaacattatctccctggtcatcgaaagccacggatatcgcgcataactgcggtctgtcagccgttacccggctggagcggggaatcgcctactatattactaccacagggctgacagagaatgaacatcagcaactgagtgcgctgttgcatgaccgcatgacagaaacggttttcagcgaactgtcacaggcacaggcgctgtttgcccgtcatgaaccggcaccgctgaccgtgattgacctcgcgggtcagggccgagcggcactggaaaaagccaacatttcgctggggctggcgctggcggaagatgaaatcgattatctggctgatgcattcacgaaactcggccgcaatccgtccgatgcggaactctatatgtttgcccaggcaaactctgagcactgccgccacaagatttttaatgctgactgggtgattgacggcgaagaacagccgaaatccctgtttaagatgattaaaaatactttcgagcagacaccggatcatgtgctgtccgcgtataaagataacgcggcggtgatggaaggctcctccgccggacgtttcttcccgcagggggaagaccgcagttatcagtatcatcaggaagagactcatatcctgatgaaagtggaaacccataaccacccgaccgccatttccccgtggccgggggcggcaaccggctccggcggtgaaatccgtgacgaaggtgcgaccgggcgcggtgccaaaccaaaagcgggattaaccgggttttctgtctccaacctgcgtatcccgggctttacccagccttgggagcaggatttcggcagaccggaccgcattgtcagcgcctatgacatcatgactgaaggtccgctcggcggcgcggcatttaataacgaattcggccgtccggcactgctcggctatttccggacctatgaagagaaagtcagcagccacaacggcgaggaactgcgcggctaccataagcccattatgctggcgggcggtatcggtaatatccgtgctgatcacgtgcagaaaggagagatcccgccgggggcgaaactgattgtattaggcggcccgtcgatgaatatcggcctgggcggtggtgcggcatcttccatgacatccggtcagtcggatgcggatctggattttgcctctgtgcagcgcgataacccggaaatggagcgccgttgccaggaagtgatcgacgcctgctggcaacagggggataacaacccgattctgtttatccatgatgtcggtgcgggcggtctgtccaacgccatgccggaactggtcagtgacggcgggcgcggcggacgtttcgagctgcgcgatatcctcagtgatgagccgggtatgagcccgctggaaatctggtgtaacgaatcccaggaacgctatgtgctggcggtctcgcctgagcagttgccgctgtttgaggcactctgtcagcgcgagcgcgcgccgtatgcggtgattggtgaagcgacagaaaaacgtgacctgatcctgaatgacagccattttgataatcagccgattgatatgccgctggatatcctgctgggtaaaaccccgaaaatgcgccgtgatgtcaccacactgaccgcggaaggcacaccgattgatcgccgcgatattaatctgcatgaagcggtaaaacgcgtgctgcacttaccggcggtagcggaaaaaaccttcctgatcaccatcggtgaccgcacggtgaccggcatggtttcccgtgatcagatggtcggcccgtggcagattccggtggcggattgcgcggtgaccactgccagccttgacagttactatggcgaggcaatgtccatcggtgaacgtgcgccggttgctctgcttgattttgccgcttcagcgcgtatggcggtggcggaagcgctgctgaatattgccggtgtgcagattggcgatattaagcggattaaattatccgccaactggatggccgcagccgggcatccgggcgaagatgccgggttatatgcagcggtgaaagcagtgggtgaggagttatgtccggcgctcggcctgactatcccggtcggtaaagattccatgtcgatgaaaacccgctggaacgagcagggcgaagagcgtgagatgacctcgccgctgtcactggtgatcacggcatttgcccgtgtggatgatgtgcgccggaccgtcacgccgcaactgcggagcgatgtgccgaaccgtctgctgctggtggatctgggggaaggccgtaataccctcggtgccaccgcactggcgcaggtgtatcgccagctgggacagaaaggcgcggatctgcgcaatccgcaggcgctgcgtgcattctttgacaccatgcagaccctggtgtgggatgaaaaactgcttgcgtatcatgaccgctcagacggcggcctgtttgtcacactggcggaaatggcctttgccggacactgcggtgtgaatgcggatatcagtgcatttgatgaggatatcctcggcgcgctgtttaccgaagagccgggggctgtgctccaggtgcgtgaagcggatctggatggcgttgtgcaggccttcaccgatgccggtctggcagatatgctgcatgttctcggtgaagctgtaccgggggatgattttgttgtccgcagccataatacagaagtctatcaccagtcctgccgtgaactgcggatcatgtgggcggaaaccacctggcagatgcagcgtcagcgtgataaccctacctgtgcggatgaagagcatgaagccaagcaggatctgacagacccgggccttaatgtggtactgacgttcgatcagaatgacgatatcgccgcgccatatattgtaaaaggcgtgcgtccgcgtgtcgcggtgctgcgtgagcagggggttaactcccatgtggaaatggcggccgccttccaccgtgccgggtttgatgccatcgatgtgcatatgagtgacctgctgaacgggcaccttccgctggacagttttcaggcgctggttgcctgcggcggcttctcttacggggacgtactgggtgccggtgaaggctgggcgaaatcgattctgttcaatccgcaggtacgggatgaatttgcgcagttctttgcgcgtccggataccttatcactcggggtctgtaacggctgtcagatgatgtcaaacctgcgggatctgattccgggggcggatttatggccgcgctttacccgtaaccgctctgaacgttttgaagcgcgtttcagtctggtcgaagtggcacaaagcccgtctctgctgctgagcggcatggccggttcgcggatgccgattgcggtgtctcacggcgaagggctggcggaattccgtgatgcggcacatcagcaggcgctgacggaacgcggcctggtggctctgcaatatgtggataactacgggcaggtcactgaacgctatccggccaacccgaacggttcaccggacggtatcacggcggtcacgaccgatgacggacgtgccactattatgatgccgcatccggaacgcgttttccgtaccgtcagcaactcctggcatccggagaactggggtgaggacggaccgtggttgcggatcttccgtaatgcccgtaaacaattaggctgataaacacgcgggtataacttttcagttttacccgcttttttacttaccacaataatattaccgcaataataaatcctctctgcttctgtcagttgctgaacagtattgataatcgttattaattagttctcacctgaatacaaacataaataataagataatctatttaaaaatagtattttagccagtttaaaattccactgtatcgatattgccatccaattatattcaataatgattttatcagtaatgtgatgaaacatagtttcattatcatttttttcgttgaatacgtagtttcaccatgttagcatttgcaaacaataatgataatgcgaatagatatcatttgctttcaaataaagttaacccaatgaaaaatacagataaattacttattgcagctattacaggcagttcattttgtagtttttatacacatgcagctcaatataaccccgataaccatattaaggttgcggttaaatcggatgcacacgcagagacagatgatcctctgtcgtctcaaacgataacagagcaggaaataaaggattcaccatcatctaatagtaacctgagtgattatttgaaagccgtccctggtgcccgtgtggagagtaaatcagaaacaggatttaccaatggtgaaattaaaccgctctctgtttccattaacggtgcgccttcagaacagacggcgtatatgatagacggggtgaatattaataacgatattgacccggcttcctccttatttgatggcaccatgggcgtcaatccgaataagagttcagagcaggcttatttctttgatgcgaaactactttcgggaataacggtttacagtaataacgttccggcaaacctgggcggatttaccggcggggcagttgtggcggaaacccggcagtacagcggggaaaatcacgcatcagtcagttaccgtaccacccggtcctcctgggcatcattaaaagcggatgaggctgtaaaagacgcgctggataaaaaagtccccaacggaatgaatgcagaatttcagcccgtttataaaaaggaattctttaatctgacggcggaatacggattaacggagaataccggtatggtattcggcttcagccgccgtgattctgatatccgccagacccggatgctgaattcgaaaggagagacggataaccgtaatcacacccgccgttccgataatatgctggtcaattttaactggacaccggataccggccggacactggaagccgggttccgcatgtcagattataaagagggtaagttttacgccaataatattgataataacgtcaatgatacccatcaggcttacggtacgacgatccggtatattcagtctgtgccgggcggtaaactgacatcaacggcagcatatgacaagttttccgataaacgccgttccaacagtaccgaagccagtgtggtgactgacctggataccggtcttgattttgaagaaggcggttatggtaacagtcagctgacgcaggaaaatatcaatttaattctggattataatgctgaccccgtattcttcggaaatacagagcacgttttcaatacaggggcagattaccgtcatacggcatatgcgtttaagcgggatgaagatgttcactcaacggtatcattaattgacagtaccggccgggatgttcttttaagtgaactgaccgcgtcaaaaggaaccgtaaatacctctcatcagaattatgcactttatgctcaggacacgattaaaaccggtgatttcacattccgtcccggcttacgtctggaacgggataattatttaagtaacacaaatatcgctccccgttttacggcttactggcaggcattaccggatacccggtttaagttcggacttaatcgttattacggacgttcatttgccacgatgaagttatccgggaaaatactggaactgaatcaggatcgtacccgggattaccgttcactgacacatttaagtacgccgcattccgatgaattgaacttcggggttaatcaggactggaataactggcgtatttccgcagattatacatacagaaagtataagcagcggattgtggttaagcgcagtactcaggatgataagaaagttgattcattcaccaacggcgatgattttaatgctcagatttatacgctgcaaataaccaataaaacaccgtggactcttggtgcgacagagtggaataccacattaggtgctgactggctgaataccggcagagccgatcttgagaaaacattagatccggatgaggcggttattcttgatggacgtctgatgtcccgtgctcagatggaaaaagaagtcaataataatgaagaggagtggatggtccgtctgggtgttgatatgaagatcccggataataatattacctggtcgaataaattttatattaaagcaccggtccattcttatgcagaaaccaacagtacggatgatattactgtttataaaacgcagaacttcggaacacatactcaatgggataccagcctgagctggcagccggctatttacggttcacatcagctttatttccgtgccgaagtactcaatgtgctgaaccaggtcaggaaaatggaaaataaaggctacagttcaaatgagtacggaatttatactccgggacgtgaattctggcttgaagttggttatgaattttaattgagacataagaaactgccggcggaaattctgttttctgccggcagcccatgacaaaacacagtatgaatagtaaatctgaattaaataaaaataaatttatcaaacaggtctggagcctggcctgtccgtattggaaaagccgggaatggaaaatagcctggccgctgattatttctgttattgcacttaattatattgttgttgaaattgcagtgaaatacagcgactggaaccgtgatttttttaatcttatgcagaataaggactgggataatttctggccgatgctgagtcagtttgttctgatcatggtggtttattcttctgtcgatcttattgaagaatatttgcgccggacattacgtatccgctggcggggctggctgacagagcggtttcttacgcagtggctgagccataagcgtatttaccggcatcagcttttatacaaagagagtgataatccggatcagcgtattgctcaggatataaaagaattttgcgatcagacattgcagctgggactgggattactgcggactatcaccagtctggtgtcttttaccgttattttatggaatctttccggaatactgacatttgaactgggcggaatgacatgggtaataccgggatatatggtatgggtggcaatattgtattccgttatcggtacatggctcacccataaaattaccagaaaactgatcccgctgacatttcagcaggaaaaatgtgaagccgattttcgttttcatctgatgcgggtaaaagaatacgcggaatcgatcagttttctgcgcggtgaaaaggcggaattatcctcatcaaaacggttattcgggaaaatatggcagaactggcaatatctgaccggaatgaaaatgaaatatcaggcctttaacagcggatataatgaggtcgcccgcattttcccgtatctggtggcatcgccgcggctgatgagcggcagcctgcaactcggggatatgatgcagaccgcaaccggattttaccgggtacaggaagcattcagctggtttgtcgattcttatgagtcagtggcaaactggcgggcagtcaccgggcgtctggtgacattcagttcgcagctggattctattaccggcaccggcacaatccgtcagtctgattctcccgaatggtctgagttatcagtatttttaccggataaccgcccggttcaggaaaatatgtccggtgcctttccggacagcagctcaataacaggcccgtcgggatgcgggaaaagtacattcctgcgcacactcgccggattatggccgcattataaaggttcattatccatgcctccggataataactgcatgtttattccccagaaaccgtatttaccggaagccacattgcgggaaattttaatatatccccatattcacggggaatatgacgatgcattgctggccggtgcattaacggatgtgggactcagtcattttattcctgaactggataccgggaaaaactggcagcacacattatccggcggagaacttcagaaaataatgctggcgcggtgtctgatacaaaaaccggcctggctgtttctcgatgaggccttatccgcactcgatgaggaaaattataaaacactgagccggttactcagggaaaaactggctcacagtcatattatcgaaatatctcacagggaagacgtgagaaatgataagcccgggttgattttatgaaaagaatactactgataaccggcatgttatttattttgtccgcctgttccggtcagcagacacaggttaatgacctgctgaaaatgaaaacactccggtatgacccggcaatagaaaccggcacgctgaataacggatttcgttattttctggcggaaaacagcacaccggagaaaaaagtgtatatccggctggttgttaatgccggatcaatgaatgaggatgatgaccagagaggcgttgcacatattgtcgaacatatggcatttaacggaacaacgcatttccccggtaataagctgatccgtgacctggaaaaagcgggattaaaattcggtattgatattaatgcattcacggattttgaaaatacggtctacacattaaatctgccggacaatgacccggtaaaaattaaccttgcgctggatattgttgctgactgggcagggcgggtaaccataaatcaggcggacctggatgcagaaaggggcgttgttctggaagagtggcgcgccagactgggagctatgctgcggctgggggataaaaagagcgccattgagatggcggggtcgcgctatgcattacgtgaccctatcggggatgcggaaacaatacagaatgtcagccgtaaacgggtggctgatttttattatcgctggtacagaccggataatatgtctctggtagtcgccggggatattaataaacaacacatcctgtctctgctgaaaacaaaattaacgatgcttccggtcagaacagatccgcctgagataattgattattctgtaccgttgccggaacactggcgtacggcttttgttcatgaagatgaaatccggacaccggcggtggaaatcagttttttcagtccttatcaggaggattattcactggcccgttataaggatgatctggttaatcagattatgacccggctgataaatatccggttacaacacctggaaaaagagaatgatgagtttatcagtaccgcgaattattactcttcagcgaccggacgggaaaccatacaatctgtattttccctgcaattatcagatgaaaaatatgatgaagccacactgagtatttttaattttcttgctactgttgagcagcagggttttacacaggctgaactggatgaagagcttgagcggttaacccgccttaatgaaaaacagaaagataaaaccatttacagtattgatcttgcggcggatatgatgacggcggcagccagtcatcagctgcttgcagggcagaatgataaatttcttctcaatcgctattatctgaaaaatatcaccttagccgatgtgaacagcgcatttcatactatgacagccgtgaaatcccggttggtgatgataacgcatccggagaaaatacagccgcaggccatggatgcggcagcactggaaaaaaactggattgaaagtcaccggttaccacagaaaaaatgggacccggccgcagaacaaataacagaactaccggatattaatgtcacggccggtagtgtgaaacttatcagaacggctgaagaatataatatcagggaatatcagctgagtaacggcagccggttaatctatcagtacaataatgataatccgggaaaagtgttctttaaggcgctgacacccggcggattacggtcagtaccggatgacgattatcatgcgctgcggattgccgtcagcctgacggatgaaaccggttttggccgttatccgctatccgcattacaggctgtttttaataagagtccggtggtaatgtcaacattactggatgagcatcagcagggtttttccggctgggcagagacggataatcttgaaaaaattctgacgatttttcatctgaaattaaatgaaagccgggtaacggaaaaagtatggcgtaaatataaatcggaaatggataaacagctggctgagaataataaagacagtcagcatctctttatgcagaaaatatcatcactgcgttatccgggtaaacataccatatatgatgccacacagcaggatcttgacgtactgagtgcggaaaaactgacgcaattgtatgaacgttatatcagtaataaaaccgattttacgtattttattaccggtgatattcagccccgcgatgcggaaaaaattgcaggaaaatatctggcatctgttggtgtaaaaaaggatggcagagaacccgttgcgattgaagccggaacaccggaaacaccattaattgtcaggggattgcaggagccgcgggctgaagtggagatctatcttgtccgcaaaaatggctggcggccggataatgcctattatctggagatcggcggtgaggtgattcaggaaaaactgcgggaaaaattacgtgaggaagcatcaggtgtttacagtgtcaccacatggttctggcacaacccgtctgaaatacaggatgagggacggatcatgttcacctgtgcaccggaacgggtggatgaactgattgccctgagtgaacgcgtactgacggaatttgagcacaacgggattgatcggcaggtattcagaaataaaatcgttcagagccgcaatattcttgagcgaacccataattcggtgaccggcatactggaagatattgaacgcagttatatgctgaccggcggcccgttattaatcggcgcttcactgcgggcaaatgaaaaggcatctccggaagagactgaaatggttttacaggactttttacgtcatgccggaaaattccatgcggtattactgcctgcggagtaatcaatgaatcgctgcaaactggccggtttattcttttctctgtgtcttcacggcggactgcttatttttttattctgtatcagccagactgattatgcggaaaacggcaatataaggacggataaccgcagtgccatgttattgctgcctgcgccggaaaaggcggaggaacactctccggatataccggaacagagcgagaaaagcctgttaccggtgataagcccggcagcggataaaaaatcagaatggcaggcggaaaaaaacagaaaaaaacgtgagaataaactgcggcagaaaattaaaaagccggttactgcaccgcggcatgataaagatgtgcataaaccggcagaggttccggataccggtttacagtcatctctgtcggccggaaatcataacctgacaacagccgataccgttgccgggcagcggagtgacgacgagctgtggttataccgggaaaaaatgcgcagagagatcctgcggtatatttattatcctgccagaatcagaaaggtcagcgcagccgttgatattaatgtcagtatttccggaaccggtacactttctgaccccgtggtgatcagaagttcggggaaccggatactggataaaattgcgctcagtgcggtcagtaaatatcagccggtaggaattccgccgccggggttggacaaaagtattgtcctgacggtggattttattaagtaaactgcgtgtttgtttgcatgtccggtataaaaaatcacctgtgtcataaaataacgacagtcatcatttttaatgtctccaaaaggagacatctaatgcattgatatttaaagaggtaaaaaagagcaaaaaagactgtcgcaaatcagagacgtttttttgtaaaacgggggaagaaaccggaagataagatgcgtatgacagcacgccggaaaaaaatagcgggtgatgaaaaatattttctctttaataacagtgtattgaattttatttttcaaagttggcacagcagttgcaatgtcttctgcagttgctcattcaattttttatgtcggcccgcactatggcggaaacatgccacataagcccgggaatgatgccagagtaaggtgcctaccgtccgttaataccgataactgcgcaagctttatcagacacagggcgacacgttgagtgaggcaccaccttaatctcactgacgggacggcaggaaactgtcgtcccgtcatcattttataccttccctgcattctttctgttctctttttcgcacagatgcatcctgatccttttctcttatcccggatccggttagcatcatgcacatgacaacaggttaagagatgacaatcttgaaaaaatggcgattatttccgcgctcgctgcgtcagttggttgtggtggcattctgtctggtattgctgccgttgctgggactggcatggcaggcgtatcagagctttgatgagctgagtaatcaggcggcgcaaatcagtatctcaactgtacaggatgcgcggcgcagtgaggaaatgtcgagcctggcgctggaaatggagcgcagctaccgccagtactgtgtgctgggtaatgaaaccctgaaaaatgtctggcacaaacagtatctccgctatgaggactatctcgcccgccagaaacaatccaccccggatccgcgttatactgatgatatcgccggcagcctcggacagttgtctgtcctgcagtgtgagaacggcgagccggttgcggcgatgaccactcacctggaagcctttgcccgcagtaacgctgatctggtgcaggctatccgtgaggcgaatttccggcgcggtgaggaacttcagaatgccatcgcccgcaaaggccagtcattcggctggcagagcctgctggtgtttgtcctgagcaccgggcttatcattctgtttacccgcatgattatcgggccggtaaaagtgattgaacggatggttaaccgcctgggggaagggcgcaatctgattcagcgccttgataattttaacggcccgagagaactgcgctcgctggcgctgcggattgtctggctgagtgagcgcctcgactggctggaatcccagcgtcatgaattcctgcgtcatatttcccatgaactgaaaaccccgctggccagtatgcgtgaaggtaccgaactgctggcggatgaagtcgcggggccgctgacggcggatcagaaagatgtggtatcaatattgagtgaaagcagccgccatttgcaggtgctgattgaacagctgctggagtataaccgcacactggtggacagcccgacagaagccaaatgggttaacctcgatacggtagtgcatgaggtggttaatgcccacagcttaccggcgagaagcaaagaaatcactacggaccttgctctggatgaaacaagtgtctgggctgaacccgtcttattaacacgtgtactcgataatctctactcaaatgcggtacactatggcgctgaatcgggtaagatccggataaccagccggaaagccggtcagcatatacagattgatgtcgccaataccggtacgccgatcccggaagaagagcaggaaatgatcttcgaaccgttctatcagggctcgcttcagcgcaaaggtgctgtcaaaggcagcgggctgggactgagtattgcccgggattgtattaaccggatgggcggcgaactgatattagtcggttctgaaggtgcggatgtgtgcttccgtattcagcttccgttccacaccttactggaataacaggtcagcattaacttgaaaatgacatttaagtccctgattgccgccgtcccgctgttgctggccggttgcgtaaaaaccgcaacgccgccggatctctccgcgctggcctctgttgtcctgccgcaggagcggacggcggattaccggattgcggactgccacgctatctgggaactcaactctgcggccgcgacagaaaacgcgctttactggctgcggatgatggattgtgctgatctgctcagcagtgatacagcccgcattatggcggggaaaatcaccccggacagctgggatactgcactgcgtcagagcattctgcttaataacaccggcacctccgccaatgacaagcgtaaggtgctcgagaccctgaatgcctacagtgccgggttcccggtctctctgcgtccgctgatgaccctgtggcgtgatcaactgaaacaggcgattgccctgagtgacgaacgccagcgctaccgccgcctgcagagcgatacggacggcaaaattgatcagctgcgtgcggttaactcccgcctgcagtttgaattacagaataccacccgcaagctggataacctgagcaacattgagcgccagctggccggccgcaaacagccgaccaaagcggatgcggaactggaaaatgcgctcgaggagcgccgtgaggcattagaagaggcagcaggtacggcagagccgaaaccggcggaagcaaaacctgcggatgtcaaaccggcagaagccaaaccggctgccgcagaaacaaaagccgcagaaacaaaaccggcacaggaaaaaaaggagtaaccccggcatgacagcacgccgcagcgcaaacttattattggttgatgatgatccgggtttactgaaactgctgggtatgcgcctgagcagtgaaggtttccgggtatcaacggcagaaagcggccctgaagcgctgaaggtactcaataaagaaaaaatcgatctggtcatcagcgacctgcggatggatgaaatggatggtatggcgctgtttgccgagatccagaaaacccattccggcatgccggtgattatcctgacagcccacggctccattccggatgccgtggccgccacccgtgaaggtgtgttcagctttctgaccaaaccggtggatcgcgatgcattatataaagcgattgacgatgcgctggcactttccaccaccacggtcagtgatgaatcctggtgtgaaggggttgtgacccgcagcccgctgatgctgcgtctgcttgaacaggcacgtatggtggcgcaatccgatgtcagtgtgctgatcaatggtcagagcggtaccgggaaagaggtactggcccaggctatccacaaagccagtccgagagcgaaaaaaccgtttatcgccatcaactgtggtgcactgccggagcagttgctggaatccgagctgttcggccatgccaaaggtgcctttaccggcgctgtgagcagccgggaagggctgttccaggcggcagagagcggcacactgttcctcgatgaaatcggggatatgccgatgccgctgcaggtcaagctgctgcgtgttctgcaggagcgcaaagtgcgcccgctcggcagtaaccgcgacattgatattgatgtccgcgtcatttccgcgacacaccgcgatttacccaaggcgatggaaaaacacgaattccgtgaagatctctactaccgcctcaatgtggttaacctgaaaattccgacactccatgagcgggctgaagatatcccgctgctggccaatcatattctgcgcgaagcggcgaaaaagcataagccgtttgtccgcagcttctctccggatgccatgaaatgcctgatgggcgcgagctggccgggcaacgtccgtcagctgcttaacgttatcgagcagtgcgtggcgctgtccaccgtgccggtgatcagtgaggcgctggtgactcaggcgctggaaggggaaaacacggcgctgccgacctttgcggaagcccgtaaccagtttgaactcaattatttacgcaaacttctccagatgaccaaaggtaacgtgaccaacgctgcccgtctggcagggcgtaaccggacagagttctataaattactgtcccgtcatgagctggatgcggccgactttaaagaataagcaaagaatcggtgtgaaccggtacattttgctatcatcttcattattagctgttttattattaatttttacatacggtgagatctatcccgggagagcaggattttatgcgtcgtacacttaatatcgccctggcccagctgaattttctggtcggagatatcgaaggcaatggtgaacgtattctgaaaaccatggcggaacagcaggcggcaggggctgacctggtcatgttttccgaactggcattgtccgggtattcaccggaagacctggtttttcgtcccgattttcatcagcggatagcgcagagcctcacccggatccaacaggccagcggtgactgtgctgtgctggtgggacacccgtggcaggaaaacagccacatttataacgccctctctttctttgagaaaggggagctccgcgcccgttatttcaaacaggaactgccgaactacggcgtgtttgatgaaaaacgctggtttacggcaggaacagaaacctgtgtgattgattttcgcggttaccgcctcgggttactcatttgtgaggatatctggactgacggtccggtggatgccctgaaagcggccggtgcggaaatcattctgacactgaatgcgtcaccgtattccactgataaaattgatacccgggatgtgctgatacaggcacactgccgccgtaccgggctgccgctggtctatctcaaccaggtcggcggacaggatgagctgatttttgatggtgattctgctgttttcgccgcagatggcagcgtaacacatcgtcttgctgcattttcagagcaaatcgcgcagtgttactttacggatttaaccatcacgccgatggcggatccggcaccgtcgttacctgttctggctcaggtttatcaggggctggtgctggcaacgcgggattatgtccgcaaaaatggttttcagggagcgctgctgggcctgtccggcgggatcgattccggcctgactgtcgccattgctgcagatgcactgggtaaagataaggtgcaggcggtgatgatgccgttccgttacacctcggatatcagcatccacgatgcccgtgagcaggcagagctgctgggtgtggaatttgatgtggtgtcgattgagccgatgtttgaagcctttatgcacgaactggaaccgaaattcgccggaacaccggttgataccaccgaagagaatttacaggcacgctgccgtgcggtgatcctgatggcgatgtccaacaaacgccgccgcattgtgctgaccaccagtaataaaagcgagtgtgcggttggttactccacactgtacggggatatggccgggggctttaatgtcctgaaagatgtgccgaaaactatggtgtttgaactggcaagataccgcaacacactctctccggcgattccggagcgggttatcacccgtccgccgtcagcagagctggcaccgggtcagctggatcaggacagtctgccgccgtatgacatcctcgatgccctgctggccgggtatgttgaaaaagatatgtccgcagatgaactgatcgccgccgggtttgatgaagcggtggtccgtaaggttatccggctggtggatatcaatgaatacaaacgccgccagtcaccggtgggaccgcgcattaccgcccggaactttggcaaagatcgccgttacccgattacatccgggtttggccgcaaaaattggtaacaggatctgacaatgaaaaagattgaggcaattattaagccgtttaaactcgatgatgtccgcgaagctctggccgaagtggggatcaccgggatgaccgtgacagaggtgaagggtttcggccgtcagaaagggcatacggaactgtatcgcggtgcggaatatatggtggattttctgccgaaggtaaaaattgaaattgttgtcgccgatgacattctcgaaacctgtgtggaaaccattatgcagacggcgcagaccggtaagatcggtgacggtaaaatctttgtgttcgatgtggcacaggttgtccggatccgtaccggggaacaggatgaagatgctatctgagttctgctgagcatccctgcaaattaaacgtatccggcggctgttatttctgacaccgccggattcttttatctgtcagtaaaaggagaagactgtgcggacaatacatgtgcgggcaatacaatggatagtggcggtgtgtgctgtggttattattctggttatggccggtattattattctgcagtcagcactgaaagatcccggtcagcatgaattaccggcgctttttgcggaggtttccgggatgaatttaaataaagaagaacagaacgagctggaagagtgtattaattcggccaaggtgatgtatttctctcaggcagtaaaaaaatgtgtgaaccgggcccggtataaaaactgacgggtaaaaaaaagagtaacagtgaaccgggcgaaaggatgggatagatataaattcggcggttatgtcactgttactcaaatgtgcttcatcttaagcacatacgctgaatatccagcgtgttgttattgttgttctgtcgcgattataaaattttgtgcggaccgaaacattcataatggatctggtctgcgctgacgccgattgcagtcagctgacgcgcaatgtgctgcataaaggctaccggcccgcacaggtagtagtggcgggttttactgagcagggcatcctgctgagcggttaaatccatcagcccggtcaggtgcggatgagcttcgtctgcgcgcggctctctgtaccagacggtctgactgaacgcaggcagctgagcaccaaaccggtttacttcctccgcaaaggcatgcacgccgccgtgctctgccgcatgcagccaggtcacgtctgccggatgctgttgtgcggcgagtgtctgcagcatagccatcatcggtgttaagccgacaccggctgaaatcaggaccaccggagtctctttttctgcctccaggaagaaatcccccagcggcggggtcagtctgaccacatcaccttcctgcacattggcgtgcagccagccggaaatcgtacctttgtcttcacgtttgactgcaatccggtaggttttaccgtccggtgcctgcgtcagggaatactggcggatctcctgattttccagcacatcatcattgatatagacactgatatactgccccgggcggtaatccgcgacaggtttaccatcgaccggagccagttcaaaactggtgataagttcactctgcggctgtttgcggatcacgcggaattcacgcagtccttcccatccgcccggcgacgccgctttttcctgatacagcccggcttcgcgctgaataaagatatccgccagcacgccgtacgctttcccccaggcggtaaggacttcctcacccggattgagcaactcttcaatggtggcaagcaggttttccccgacaatcggataatgctcaggtctgatcatcagactggcgtgcttgttggcaattttttccactgccgcacccagtgcgccgaggttatcaatattcatggcataggcgcagaccgcattaaacaacgcttcacgctgtgcgccgttctgctggtggctcatggtgaagatatcttttaactccgggtgctgacgaaacatgcggtcatagaaatgggcggtcagtttcgggccggtggcggcaatcagtggggcggtggattttacggtggcgatagtttgtgcatcgagcatagcagggctcctgaaaaagcatcacatcagtgtgaaatttataacatgtattttttatgcaacttataatacagggcagaatttgtaaagcgcaaatttttctgctgtttctgaaaatccggtgaaaatagcgaaattgatcagtgagcgtgggtaagaggggatcacaaatccggtattgtgtccgatggacaggatattcttatgaaataataagcatgctaattacctgattttaccgctatgcaatcgtttgcgtattttttgtttccggggctatctcaattcagaaaaagggtttacactgtagggcattcgtccccggaaaggggtgtttttttatcggcatcaggcgagtcaggagaagcgaatgttaaagcgtgaaatgaatattgcagattacgacccacaactctggcaggcgatgaaagacgaagatcgtcgtcaggaagagcacattgaattaattgcctctgaaaactataccagcccgcgcgttatggaagctcagggctcccagctcaccaacaaatatgcagaagggtatccgggcaaacgctactacggcggctgcgaatatgtggatattgttgaacagctggcgattgaccgtgcaaaagaactgttcggcgcagactatgccaacgttcagccgcactcaggttcccaggctaacgttgcagtgtactccgcactgctgtcaccgggcgatacagtattagggatgaacttagcggaaggcggtcacctgactcacggctctccggtaaacttctccggtaaactgtacaatatcgtcccttacggtatcgattctgccggtaaaatcgattatgacgatgtcgctgaacaggcgaaaaaacatcagccgaaaatgatcatcggcggcttctctgcctactccggtgtggttgactgggcgaaaatgcgtgaaatcgctgacagcatcggtgcttacctgtttgttgatatggcccacgtagccggtctggttgctgcgggtgtttatcctaacccggttccgcatgctcacgttgtcaccactaccacgcacaaaaccctggcgggtccgcgcggcgggatgatcctcgcgaaaggcggtgatgaagatctgtacaaaaaactgaactcagcggtattcccgggtaaccagggggggccgctgatgcacgttatcgccggtaaagccgtggcgttaaaagaagcaatggagcctgaatttaaagcaaatcaggtccaggttgtgaaaaatgccaaagcaatggttgaagtcttcctgaaccgtggttataaagtggtgtccggcggtactgagaaccatctgttcctggtggatctggtcgataaagacatcaccggtaaagatgcggatgcggcactgggccgtgcaaacatcactgtcaacaaaaacagtgtgccgaacgatccgaagagcccgtttgtgacttccggtatccgtgtcggttccccggcgatcacccgccgcggcttcaaagaagcagaagcccgtgaactggccggctggatgtgtgacgtgttagataacctcaatgatgaagcgaccattgaagctgtgaaacaaaaagttctggctatctgcgcgaaatatccggtttacgcataatcgcgttaccaatctgatgtaaccaaaacccgcttcgttcgccgcgagcgggttttttgtattcctgaaaggagaggcagatgtttgttccgtcatcgctctggctggcgcttgattattttacgtattttttttcctacgggatttttcttccctactggggcgcatggctgaaaggtgaagggcatgatgtggcaacggtcggtatgctgctcagtgtggggctggtggcgcggttcgtcggcagcctgtttatcacaccgctgtttaaagacccgtcacggctgatttttgccctgagactgatggcgctctgttctttcctgttcgcggtggcgttttatttcggttctcactggctctggctcttttttgttatggccggattcaacctctttttctcgccgatgatcccgctgggggattccctcgccgcaacctggcaaaaacagttcccgatggattacggctcgatccgtgtctggggatcggtggcatttatcatcgccacctcggttaccgggatgctgatggatatctggaagcatgaggtgattctggctgcattagtggtcagtaccggctcgctgttgctgacgtcgctgctgcgaccgcgcattatgccgtccggagagatgaaacagcgcggtccgcaggtgaaattccgtgttctgctgaaagataatgcggtggtccgctttctgctgtgtgtgagtctgttgcagggggcgcatgccgcctattacggcttcagtgtgatttactggcaaaaagtcggctattctgatgccgcgatcggctatctctggtcgctgggcgtggtggcggaagtgattgtctttaccttcagtaataagctgttccgccgctggagtgcggccaatctgttactgctttccggtatctgcggtattcttcgctggtcgctgctgggcatgtcggcggcactgccggtgctgattgcggcgcagatcctgcacagcggcacctataccgtgtgtcatctggcggccatgcgctttatcggtgcccgcaaatccacagagatcattccgttacaggcggcgtattccgcgctggcgatgggcggggcgattgcggtgatgacgctggtggccgggtatctgtatgaggatatccacggcggtatattttatctgatggcactgacggtgcttccggcactgttcctgcgcccgaaagtccggccgcagaccccggaaaatgcataataaaaaagggttatgacgaaagtcataaccctttttcacatctggcggaacagaatcagcgtttcagagactcagtcagctcatcacgcagttctgccagcagttcgcggaccacacgcgggctgcctgcaacgatgttgccgctgtcgatataacggtggtcaccggtgaagtcagtgacgataccgcccgcttcacggaccagcagttcaccaccgaggaagtcccacggcttcaggccgatttcaaagaaaccgtccacacggccggcagcgagataagccagatccagtgcggcagagccggtacggcggaagtctgagcagcgggtaaacagtttgccgagcattttgatataggtatcagcgtgctgtttggctttgaacgggaagccggtagccagtaccgcgccgtcgagatcacgggcagtcgcaccgcgcagacggtagccgtttaattgtgcgccctgaccacggaccgcagagaataattcgttacgcatcggatcgtaaacaaccgccacttcagtgcggcctttgatacggaatgcgatagataccgcgaagtgcgggagacgtttgacgaagttggtggtgccatccaggggatcaatcacccattgcatatcatgttcttcaccgggtaactcaccgcactcttcggagataatggtgtgcttcggataagatttgcggatgatctcgataatcatctgctcggcttcgcgatccacgttggtcacaaagtcattggaacctttctgagttgtctcaacagtgtcaggcatttcatagtgtttggcaatcaggttgccggccttacgtgcagcacgtatggcgatggtaagcatcggatgcatggggttgtccaccgggatgttaaagaacgaaaataaacgcggcagagtataacaggtgatcgtcaatctgactattcttgtgttaagatattgcgataatttctcaaagaaagtgtgttatgtccgaaaatatccgaatcgtcctggttgaaacctcacatacaggcaatatgggctccgctgcgcgggctatgaaaacaatggggttatccagcctttatctggtcaatccgcaggtacagccggactctcacgccatcgcgctgtctgccggtgccagtgatgttatcggcaatgcaaagattgtcagcaccctggatgaggcgattgccggttgtgaactggtgatcggcaccagtgcccggtcacgcacactgccgtggccgatggttgaaccgcgtgaatgcggggaaaaaagtgttaaaatcgcacagaccgcaccggtcgcgattattttcggccgtgaacgtgtcgggctgaccaacgatgaattgcagaagtgtaattatcatctttatatcccgaccaacccggaatacggctcgctgaacctggcgatggcggtgcagctggtcagttatgagatccggatggcatttcttgcctctcagaatgagagcgaaccggcaaataatgatgaggcagatgaggtacactatccgccggcggatgatatggagcggttttacacgcatctggaatcggtactgaatgaatccggttttatccgcaaagcacacccgggtcagattatgaaccgtctgcgccgcttatttacccgcgcgcatccggaaacacaggagctgaatatcctgcgtggaatcctgacttctgttgagaaatgggcgaaaaaatagttgagtaaattactgggttaaatagttgactaaattactcaggaatgacacaatttcttcaccatttatcacggggatccggttatgagactgacatcaaaagggcgctatgcggtaaccgctatgctcgacgtagcgctgcactcccatgaggggcccgtaccactggctgacatttctgaacgtcagggtatctccctctcttatcttgagcaactcttctcccgtctgcgtaaaaacgagctggtttccagcgttcgcgggccgggcggcgggtatcttctggcacgcggtgccggtgagattttcattgctcaggtcatctcggccgtcgatgaatccgttgatgcgacccgctgtcagggaactcaggaaggttgtcagggcggtgaccgctgtctgacacacgcgctgtggcgtgacctgagtgaccgtattactgatttcttaagcagtatcagtctggaagagttagtaaatcataaagaagtgattgatgttgctgatcgccaggatgataaacgtcgtgcacataatctggcaattaacgaaacgattatcaatctgcaagcataagcagaaacctgcgttaacaacgcaaccgtagttcatggagcaattgagcgatgaaattaccgatttatttagattactcagcaaccaccccggttgatccgcgtgttgctgaaaaaatgatgcaatgcctcacaatggacggcatcttcggcaacccggcctcacgttctcaccgctttggctggcaggccgaagaggctgtcgatattgcccgtaaccagattgctgatctggtcggcgctgacccgcgtgaaatcgtgttcacttccggtgccaccgagtctgacaacctggcgattaaaggtgcagccaaattctatgagaaaaaaggcaagcacattattacctgtaaaactgagcataaagcggtactcgatacctgccgtcagttagagcgcgaagggtttgaagtaacctatcttgcgccgcagcgtaatggcctgatcgacctggctgaactcgaagctgcaatgcgtgaagacaccattttagtctcaatcatgcatgtgaataacgaaatcggtgtgattcaggatattgaagctatcggtgaactgtgccgcagcaaagggattgttttccatgtggatgccacccagagcgtcggtaaagtgccggttgatttaagcaaactgaaagtggatctgatgtccttctccggccataagatttacggcccgatgggtatcggtgcactgtatgtccgccgcaaaccgcgtatccgcattgaagcgcagatgcacggcggtggtcacgagcgcggtatgcgttccggtacactggcagttcatcagattgtcggtatgggtgaagcttaccgtatcgccaaagaagagatggcagcggaagctgagcgtctgtccgcactgcgtatgcgtctgtggaacggtatcaaagatatcgaagaaacctatctgaacggttgcccggagcactccgcaccgaatattcttaacgtcagtttcaactatgttgaaggtgaatccctgatgatggcgctgaaagatctcgcggtatcatccggttctgcctgtacgtccgccagcctggagccgtcatatgttctgcgcgccctgggtatgaccgatgaactggcgcacagctcaatccgcttctctctgggtcgtttcacgactgaggaagagattgactatgctatcaaacttatccataacgcaattggccgcctgcgcgatctttccccgctgtgggaaatgcacaagcaaggtgttgatattaacagtattgaatggtcacaccattaatcagacggtttcaggagtataaacaatggcttatagcgataaagtaatcgatcactacgaaaacccgcgcaacgtcggttcattcgacaacgaagacccgactgtcggcagcggcatggtgggtgcaccggcctgtggtgacgtaatgaagttacagatcaaagttgatgataacggcgtgattgaagacgcacgtttcaaaacctacggctgcggctcggcgattgcgtcaagctcactggtgactgagtggatgaaagggaagaccctggatgaagctgaagccatcaaaaataccgcgattgcggaagaactggaattaccgccggtgaaaattcactgctcgattctggctgaagatgcgatcaaagcagcaattgcggattacaaaagtaaacgccggggcaactaatagcccgccgctgccggtgtgcagcaggtaaaacaataaaataatggcggatactgatcccatcggtcatccgccatactggtttatagagcgaggtgtgtaatgtccgtttctcttacagaaagtgcggcaaaccgggtcaccagttttctggcaaaccgcggtaaaggagtaggtctgcggttaggcgtgagaacctccggttgctctggtatggcttacgtacttgaatttgccgatgtcattaatgaagatgatgtcgtctttgaagatcacggcgtaaaagtgatcatcgacggaaaaagtattgtgtatcttgacggcacggaagtggatttcgtgaaggaagggttaaacgaagggtttaaattcaataacccgaacgtcaacagcgaatgtggctgcggcgagagttttcacgtttaactgatccatttatccgcgaagagaacacgatgaactatttttccctgttcagcctgcctgtgcgttatgaccttgacacacaggcacttgccggtcgttatcaggatttgcagcgccagtatcacccggacagatttgccgccggtgatgcgaaagaacaagcgcaggcactgacaatggccgcgaccatcaatgacgcctaccagtccctgaaacatcccctgaaacgtgcggaatacatgctgctgttacatgatattgatatcaataatgaacagcacacaatgcatgatactgcatttctgatggagcagctggagctgcgcgaagccctcgatatcatcgaacagaaacaggacagtgatgcactggccggttttgctgccactatcactaaaatgacaaaaacccggatggcagagatgattcatcagctggatgacgaagactggaccgctgcagcggacagcgtgcgtaaattacgatttttgagtaaactgacgcaacaaattgaaaatcttgaagaacgtttgctcgacagtttctaggggaaaatatggcactgttacaaatcagcgaaccgggacaggctcccgccccgcatcagcgccgccttgccgcgggtattgatttaggcaccactcattcactggtcgccactgtgcgcagtggtgaaaccgatgtgctgcccgatcacgaagggcgttatttactgccttctgtcgtgcagtacagcgcggacagccgcctggtcggctgggatgcccgcgcaaatgcggcggccgatcctcagaataccattatctctgtcaaacgcatgatggggcgctcactgaccgatatcactgagtgctatcctgatctgccgtatcagttgcaggcgggtgaaaacggcctgccaatcatccgcactgcggccgggctgacagatcctgtccgtgtctcggcggatattctgtccgtgctggcacagcgcgcgcaggaaaccctcggtggtgaactggatggcgtggtgatcactgttcccgcgtatttcgatgatgcgcagcgtcagggcaccaaagatgccgcccgccttgccggattacacgttttacgtctgctgaatgagccgacagcggcggcaatcgcctacgggctggattccggtcaggaaggggtgattgcggtttatgacctcggcggcggtacgtttgatatctctgtgctgcgtctgagccgtggtgtatttgaagtgctggccaccggcggtgataccgcgctcggcggtgatgatttcgataatctgattgctgactggatttatgagcagcgcggcattcagtcacaggggcattcgcagcaccgcgaagtattaaatgcggcggcggaagccaaaattgcactgtctgatgccgcacaaaccaccatctccctggatggctggcagggtgtgctgacccgtgagacttttgaggaactcattcgtccgctggtcagaaaaaccctgatgacctgccgccgggccctgaaagatgcgggaacggatcaggatgaagtccgcgaagtggtgatggtcggcggatcaacccgggtgcctctggtgcgtgagctggtcggtgagttcttcagcaaagagccgctgacctcgattgacccggacaaagtggttgctatcggtgccgcgattcaggcagatattctggccggtaacaaaccggacagcgacatgctgctgctggatgtgatcccgctctcgctggggctggaaactatgggcggcctggtggaaaaagtcattccgcgcaacaccaccattccggcagcccgtgcccaggaatttaccacctttaaagacggccagaccgccatgaccattcatgtgctgcagggcgagcgggaaatggtcagcgactgccgttccctggcacgttttaccctgcgcggcatcccgccgatggccgccggtaatgcccatatccgtgtcaccttccaggtggatgcggacgggctgctgagtgtcagtgcactggagaaatccaccggtgtgcaggcctcagttcagatcaaaccgtcttacggcctgagcgataccgatatcgccgggatgatcaaagattcactcgaaaacgcagaaaacgatttatccacccgccgtctggcggaacaaaaagtggaagctgcccgcctgctggagagcctgactcaggcgctttcagaggatggcaatttactgagcgacgacgaaaatgccgctattgatgcggcagtcggtgtgcttattgagagcgttgaaggcgactcaccagccgccattgaaaacgcaattaaacaactggacaagcaaacacaggtattcgcggcgcgccggatggacaattctgtccgcaaggcactcgcgggccactctgtggatgagatataacgggaagattatgcctaagattgtttttttaccgcatgagtcattatgccctgaaggtgcggtatacgacgcaaatgaaggtgagtcaattctggatgttgccctgcgtaacggtatcgaaattgaacatgcctgtgagaaatcatgtgcctgcacaacctgtcactgtatcgtccgcgaagggtttgactccctcggagagagcagtgagctggaagatgacatgctggacaaagcctggggactcgagccggaaagccgtctgagctgccaggcgaaagtcgcggatgaagacctggtggtggaaattccgaaatacaccatcaaccacgcgcgtgagcactgataaaggagcctgaaatgggactgaaatggcaggacagccgtgaaatcggcgaagctctgtatgatctgtacccggacacagatccgaaaacagtgcgtttcaccgatatgcaccagtggatctgcgaactggaagaatttgacgatgcccctgaaaaatctaacgaaaaagtattagaagcaattttgttagtctggctcgacgaatttgaatgatgtcttttgttacgcgcatcaggccgcacaattgtgttagcgtgcggtctctgatgcgcgtatgctgttaccgcctcctgtgcagaccggcacgccgtgcattcctcaaataaaatctgactgttacggcagtctaaaagtcaaaagagagaacgaaatgacgcaactcatcatgcctgtaaccttatcgtatgaacctgcttctccggcgtggggagagaaagccctggtcagcgcgactgacaaaggaatgaccgttcatttaagccgtaaagggatgctgtgcgccgtgcagagcgcgggccgcaaaatcgatggtcagggtatccgtaatgtggtactgagcggcagtaactgggatctggaaaccagctgggcattctggcagggcttccgtggtccgaaaggcgcacgctcgattgaatggccggaattaccggaagcggataaaaccgaactggaacaccgtatccgtatcatcgactgggtacgcgacgttatcaataccccggcggaagagctgagcccggaacaactggcgcagcgtgcggttgatctgctgtgcggtgtttcctgcaattcagtcggttaccgtatcatcaaaggggaagatttacgcgagcagggctatatggggatccatacggttggccgtggttctgtacgtccgccggtactgctggcgctggattacaatccgggcaaacaggaaaatgcgccggtgttcgccagcctggtcggtaaagggataacctttgactccggcggctacagcctgaaaccaacttcctccatggactccatgaaatccgatatgggcggcgcagccaccctgaccggcgcactggcaatggctatcagccgcggcctgcaaaagcgcgtcaaactgtacctgtgcatcgcggataacctggtgagcggtaatgccttcaaactgggtgatattatccgttacagcaacggtaaatccgttgaaatcatgaatactgatgcggaagggcgtctggtactggcggatggtctgattgaagcggacaaagataacgccgggtttatcattgatgcagcgaccctgaccggggcggcgaaaactgccgtcggtaacgactatcactctgtgatgagcttcgatgatgcgctgtacaatgaactgatgtcagccgctgatcaggaaaaagagatgttctggcgcctgccgctggcagaattccaccgccgtcagatgccgtcctcctttgcggatctgagcaacaccggggcaccgaatactgccggggcaagtaccgctgcggcattcctgtctcattttgtggaagattaccgtaaaaactggctgcacattgactgctcagccacttaccgcaaagcgccgtcagacttatggtctgcgggtgcaaccgggtacggtgtgcgcactgtggcggcactgctgctgaaaaaagccggacagtaaccgggtattgccctgctgattctgctgtaaaacggtcacataacatgtggccgtttttctgtgatatttacgaagacagatgctgaaataaggagttctgtaatggcggatatactcccggtacaggaagtgatgattgaacagggcagcgcactgctgctcagcgtaccggaaaacaaaccggacgcggtgcttgatgcgctgaccggcgtgtttaaacagcacaaaccggtgcgccgtgcattttgggtaatggctgccgaaaaaaacaatactgtcccagatgaaccggtgctgctgattgtgctggagctgaatgaagagcaggaagtggataccgtgatccgtcaggcggctgaggctgcgatggagcaccttgctgacggggagcatattgatttttgtctgttaaatccggatgaaaatgacgggctgacgcacttcctgacacagcacactcaggcattctatcagcgccgtctcggtggctggctgcgtaacgccattccggtaacagaagcgtaacaataatttatccggatggtgaatatgtgtagtgcatatattcagaataatgcactatacgcttgtttaggctttgtttacacttcgtgaaataataccgaacaagtgcccgttttccgggctcaccagaaaggattgattatgcgttctccgattgcaggacagggtcccggcaaaaaacgctgcattgcagtgcttcttgcatcagcgctggcgctcatgggttgtgatgacaccggcagtaaaaccacggcggcgggcagcaatgacagcgcgccggccaataataataaagaaaactcgtcttcttcatctgcttcctctccgtctgcgaaaaaaacacaggatgccgcatcactggcagagctgagtaagcgctacgccgggaaagatgtgactatcatcgacgcctctgagatccagctcgacggcgcaaatgcgatggtggtgaccttctctgttccgctggatccgaaccaggatttcagtcagtttgcccgtctggtggacgtgaaaaacggcaagctggaaggtgcctgggagctgtcggataacctgatggaactgcgcatgcgccatctgccgccgtcacgggaattgcagctgagtatcgatcgcggcgtgcgcggtatcaatgagcgcacactggttaatggttatgacttaaaactgaccactgcggatgtggtaccgagtgtcggttttgccagccgcggctcgctgttcccggctgatgtcctgcagggactgccggtattcgcgctgaacgtggacagtattgatgtcaatttttaccgcatcaaaccggattccctggcgtctttcctcgccagctggcagtacggcaacaatctccagtactggaattctgatgacctgctgaataacactgatctggtctataccgggcgttttgatctcaatccgcagaaaaacacccgtgaaaatatgcagatcccgctgaaggatatcaagccgttacaggaagagggcgtgtatctggcggtgatgcagcaggccgggcgttacagctacaccatgccggccacactctttaccctgagtgatatcggcgtttccatgcacagctatcttaatgagctggatgtatttactcagtcgctggcgaaaggcagtgcactgaaaggcgtggaaatccgtctgctcgacagcaaaggtcagcttctgggcaaagcagaaaccgacagcagcggtcatgcaaaactggatcgcggggcggatgccgcgctgttactggcgattaataacggccagaccagtatgatcgacctgaaaaacccggcgcttgacctggcagagtttgatatcgccggtccgcagggctatgcaaaacaattcttcgtttttggtccgcgtgatctgtaccgtccgggggaaactctggtaattaacggcctgctgcgcgacggcgatggccatccggttaaagatcagcctgtcaaagtggatgtgctgaaaaatgacggtcaggtggcttccaccttcgtctggcagccggaaaacggtctttatcagtaccagtatgcgattccggaaaacattgagaccggtaagctgacactgcgttttgacctcggggataacacaccgcgcttctacagcgtcaatgtggaagatttcatgcctgagcgcatggcgatggaaatcaaaaccgacaaacagccgatcaccacacagcaatccgctgattttgaaattgaaggccattatctctatggagcgcctgctgccggtaatcagctgaccgggcagctgtttatgcgtccggatcgtgaggcatccgccaaattgccgggctttgaattcggtgatattcaggaagagagcctgacccgcaccctggatgagttcgacgaaaccatggatgacggcggcgaactggctttcaccatcagtaatgattactggaaagaggtgaaatcgccgtttaaattaatcctccaggcaagcctgatggaaaccggcggccgtccggtgacccgccgtgcggatgtcgcggtatggccagccgcgaaaatgaccggtattcgtccggtcttcgccaaaaaagaggtttacgactaccgcactgacaaatatgtgtcgcagtacagcatggatgaagattcactggctgaattcgaaattgtctataccgaccgtcagggtaataagttaaaagcggatgatctgaatgcgcgtctgatttatgagcgccgtgattattactggcgctggtccgactccgaaggctggtcatccggttatgatcagaaagacctcgtgatgtctgatgacaaaatcagtatcgccaaagacggtaccgcaaaagtgaccgtcccggtctcctggggggcataccgtctggaagtggtggatccgtctaccgggctgaccagcagtgtgcgtttctgggcgggctattcctggcaggataacaccggcggtaccggtgcggttcgcccggaccaggtgaaactgaaactggataaaccaaattatcacgccggtgataaagttaaactgaatgtgactgcaccgcaggccggtaaaggctatgtgcttctggaatccagtgacggcccgctgtggtggcaggaagtggatgtgccggaaggcggcatcgatgtggaagtcccgctgaacaaagagtggacacgccacgacctgtacgcgactgcggtggttgtccgcccgggcgacagctcccgtcaggcgaccgtcaaacgcgcggtcggtatcctgcatatcccgatggccgatccggcccgtaagattgatgtgacattggatacgccggcccgcatccgtccgaatcaggatctgaccgttaaaatcaaagcaaaagcacaggacggcaaagcagcaccggaaaaagtgaatgtgctgatttccgccgtggacaccggtgtgctcaatatcaccgactataaaacgccggatccgtatgacgccttcttcggccgcaaacgctacagcgtggaccagtatgatgtctatggacagttgattgagggcagtggtcgtctcggcacactgcggtttggtggtgacggcggcgatgatctcgatcgcggcggcctgaaaccgctgaccgaagtgcagattatcgcgcagcaggcggcaccggtggaactgaatgcgcagggcgaagggactgttactctgccgattccggatttcaacggtgaactgcgcctgatggctcaggcctggacggacgaagatttcggacatgcgcagaataaagtgattgttgctgcaccggtgatcagtcagatggcactgccgcgctttatggccggtggtgaccgttcacagctgacgctggatctgaccaacctgaccgatgaaacacagaatctgaccgtgaatttcagtgcggacggcatggtgcatctcaaaggggcggcagagaaagaagtcaccctggcgaaaggccagcgcacctccgtgaatgtcccggttgaagctgccaacggctttggtcagggcgaggtgttcatgacggtcaaagggctgaaactgcctgatgaaagcagcaacacctacaaaaacagctggaaaatcggtgtgcgtccggcatacccggctgaaactgtttcttactccatgtcactcggcaatggcggggaatgggcgttaccggcagatcaaatcggttatctggatgccggtaccgtgtccggtgaaatgacgctgaccagccgtccgccgctggatatctcgcgttacatccgtgaactctatgcctatccgtacggctgtctggagcagacagtgagcgggctgtatccgtctctgtactcctctgaggctgagctgaaaaaactgggcatcaaaacccagacggacgccggacgccgtcaggcggtgatgaccggtatcccgcatctgctcggcatgcagcgcagtgacggcagtttctccctgtgggataacagcggcgcggaagagccgtggctgaccgcatacgcgacagattttctgttccgtgccggacagcgcgggtttgatgtcccggcggatgccctgagtaacgccaataaccgcctgctgcgttatctgcaggatcgctcggtgatcagcagcaactattacggtaacagcgatcagatgcgctttgcggtacaggcgtatgccggttatgtgctggcacagcagcagaaagcaccgctcggtgcactgcgtcaggtctatcagcgccgtgatgatgccgcaagcggactggcactggtacagctgggtatcgccctgaagaaaatgggggatgcggatcgcggtaacgaagccatccgtctgggtgtgatgaagaaccgtgacagcgtctacaccggcgattacggcagcaccatccgtgatgatgcgatgattattgcgctgctgagtgaggcggattccaatgcggatcagcgttacggcaagttgcaggcactctctgcggagatacagaataaccgttacttctccactcaggagagcaacgccctgtatctggcaggccgtcagtacattaatcagagcgaaaaaccgtggtctgccctgatcaacggacaggccccggcggtcagccgtgacagcgcactgcgtgaaatcctcaccgcggcacagctgaacaacggcatcagtgtcgcgaaccgcggggatgcggagctgttcggtcgtgtgaatatcaccggctatccgttacaggcaccgcacccgtcatctgaagtgctgaagatcaagcggacgtatatggatctgaacggtaatccgatcagtattgaccgtctgagcagtggtgacctggtggcagtccgtctggatattcaggctgaccgcaacgtgccggatgcgctggtggtggatctgttaccggccggtctggagctggaaaaccagaacctggcggcagccagtgcaagtctggcggacagtgcgccgaacctggctgaagctatccaggatatgcagcaggccaatatccgtcataccgagtaccgcgatgatcggtttgtctcccaggtggcggtggaagagtaccgtccggtgacgctggtctatctggcccgcgcggttacaccgggtaaatacagtgttcctgcaccacaggtggaatcgatgtatattccgtcctggcgtgccaccggtgtgacaccggcgacactggaagtggttcgttaacagcaccgtttgttgtccgcagcctccgggctgcggcagcaaaatatgttttatgcccttataacaaactataagggcatttttatcttaagaattctgataatgcggtttgatacatgaaagtgtggtttaaacgtctcgcgctgaccggcctgataacaattgttctgacaccgccgctgctctggctggccgataaaatctggcctttaccgctggatgaggtggtgatggcgcgtacggttacggctgaggacgggtcaccgctgtggcgtttcgctgacagtaacggcgtgtggcgctacccggtcacactgaaggatgtatcaccggaatttattgaagcgcttctgacatacgaagatcgctatttctatcagcacccgggcatcaacccggtggctatcggccgcgcggcgttgcaggatctgacttccggacgtattgtctccggcggcagcacgctctccatgcaggtcgcccgtctgctcgacccccatgaccgcaccctgaccggcaaactgaaacaggttttccgcaccattcagctggagtggcactattccaaagatgagattctggagatgtatcttaaccgcgccccgtacggcggcacggtggagggtattggtgcggcgagctggatgtatctcggcaaaccgccgtcggaactgactgccggggaagcggcactgctggcggtactgccgcaggcaccaagccgtctgcggccggatcgttatccgcagcgcgcggaagcagcccgtaataaggtgcttgaccggctggccgaatttgaggtgtggccgcagtcaaaagtgaatgatttaaagcaggagagtatctggctggcaccgcgccaggtgccgcattccgcgccgctgctggcacggcgtgtggcgcagggggtgaaagacccggtgatccgcaccaccatcaatccggccattcagcgtcagctggaggagatggcccgcaaccgcaaatatcagctgccggaaaaaacctcgctcggcattatggtggtggataaccgcgatatgagtgtgaagggctatgtcggctctatcgatttctctgatgacacccgtttcggccatgtggatgtgaacagtgcctggcgttcaccgggttccacactgaaaccgtttttatatgccctggcgatggatgaggggctgatccacagcgaatctctgttacaggatgtgccgcgccgttttaatgattaccggccgggcaactttgataccgggttcagcgggccggtgagtgtcagtgaggcactgcgccgttctctgaatctgccggtggttcagttgctggatgtttacggtccgaaacggttcagtgccaaactgcgtaacgtcggtctggaactgcgttttccgctcggcagtgatccgaacctgtcgctgatcctgggcggtaccggggcgcggatggatcagctgattgcggcctacagcgcgtttgcccgtcagggcaaagtggcaccggtgcgttttcgtccggaagatccactggcagagcggcagctgatctccccgggcgcggcgtggatcacgcgccgggtgatggccggagagacacggccgctggcagatgaccggctggcgcaggatgtgccgctggcgtggaaaaccggcaccagttacggctaccgtgatgcctgggcactgggggtgaataaccgctacaccatcggggtgtgggtcggccgtccggacggtacgccggtggccggccaggccgggtttgcaaccgcgatcccgatcctgtatcaggtggacagttatctgcgggcacgcggcggcaaaaaattgccggatccgaaacccatcagcgtcagcagtaagatgatttgctggccgtcagggctggcggcggacaaacaggatccgaactgccgtcagcagcggatagcgctggtgctggacaatactgtgccgccgacactgccgtccgcagggcaggaaagcctgtccggcaccaatgcggtgatctgggttaacggacagggggaacgggtgtcgccggattgtccggatgcacaggagaaaaccgtggcgctgtggccgattgcgctggagagctggctgccgccgggtgaacgccgcagccaccgtctgccgccggtgagtaaaacctgtccgccgttgcgggtggaagcggctccgctgctgatttccgggatccgcgaaggggatgtgctgcgccgtctgccgctggcgaaaaccctcgatctgcgggtggtgacgcagggcggagagggcactcagtggtggtttcttaacggcgaccaggcgggcagtactgagtccggtgagccgctgttgctgacgctggacaccccggggcgttatcagctgacggtgctggatctcagcggccaggtcagttcagtcagttttaccctgaaatagcagaaacggcgggaaccgcagcggaaaaagtgtgatacagacggaaaatctgtgatctgttatgcggaatactttgcaaaaatgttgcgtaactgtaggaaaaacagaggtgagcccgtataatcactgccttaccacaaggtgtggaccggtctgccgtcagccgcaaataacaatgacaacagcgcacatgcgcacaatgaggtcaattcatgtctgtacaacgcacattttctatcattaagccaaacgccgtaaagaaaaatgctatcggggccatttatcaccgttttgaaagcgccggtttccgtattatcgccgccaaaatgctgcacctgacccgcgaacaggcggaaggattctacgctgagcacaaaggccgcccgttctttgatggtctggtggaatttatgacatccggcccgattatggtacaggtactggaaggggaaaatgccgtgcagcgtcaccgtgatctgatgggcgccaccaatccggataacgccctggccggtacactccgcgcagattacgccgacagtttcactgaaaacgccgtacacggctctgatgcggaagaatccgctgcccgtgaaattgcctatttcttcactgaagatgaaatctgcccgcgctgataacacaaagcaggaaaaaacctgtgttatcctgctttatcagtgaattcagtctcaaaagcccggtaatccgggcttttgcttttttaccggacaacaaggactgagatattggcgtagtggatcagtgcggacgcggtggagcccaggaaacggcttttcatggtcgggtttttggaaccgataacaatcaggtcggctttaattctttctgcattatcaagaatggcctctgccgcacttccgataagtacaccggtggaaatctgttctttctgtacagcaaatttttcggtggcggcatccagttttgcaagcagagctttgatgcgctggtcttctgacttggcattttcggtcatcacagggaatgtcagaccatagtcaaaaagctgttcagacggaagaattaccgtaacgaaatgaaatttcacatttttatctttggcatagtcgttaatctcagtaatgacgttctgagataacgcaccggcattcagatcgatcggaaccagtataattttatgcataacaactcctttatttcagattaaatgacctgtaaaagatgagtgttaatattattaatatctgaaaaaatgatttaaacaagtactattatccaataaatcgatttacatttacgtgttttaatttgccatatcaccattaatgtttgtacaatgccgcgccccgttatgatacggggcttttatatttccgccgtatccgtgacgcagtccgtttcagcggctatccttattcctgtatctgtgatgcgcgccgcgtgtcaccgccgaaagtgtaacaacgaggcaatgttaacaatgtcagaactgaccactcaagacgcctgtgtaacaggctccgcaccgattgctcctgaaaaaatcaacggaaaaattaatttactcgacctgacccgcaaagaaatgcgccagtttttcgccgatatgggtgagaaacctttccgtgctgatcaggtgatgaagtggatttatcactattgctatgatgatttcgatctgatgaccgatatcaacaaagtgctgcgcaccaaactgaaagcggtggcggaaatccgggccccggaagtgtcagaagaacagcgctctgcggacggcaccattaagtgggctatccgtgtcggcgaccaggaagtggaaaccgtctatatcccggaagatgaccgcgctactctgtgtgtctcttcccaggtcggttgtgcgctggaatgcaaattctgctcaaccgcgcagcagggttttaaccgcaacctgcgcgtctctgaaattatcggccaggtctggcgtgccgcgaaaatcatcggctccctgaaatccagcggccgccgtcctatcaccaacgtggtgatgatggggatgggtgaaccgctgctgaacctgacccatgttgtcccggcgatggaaatcatgctggatgactttggtttcgggctctccaaacgccgcgtgacgatttccacctccggtgtggttccggcgctggataaactcggcgatatgattgatgtggcgctcgctatttccctgcacgcaccgacggatgatgtgcgtgatgaaatcgtgccgatcaacaaaaaatataacattgagacattcctggcatctgtgcgccgttatctcggaaaatccaatgcgaacggcggccgtgtgactgtggaatatgtcatgctggatcatatcaatgacagcactgatcaggcgcatcagctggcggcctgtctgaaagacacgccgagcaaaatcaacctgatcccgtggaacccgttcccgggcgccccttacgggcgcagctcaaacagccggattgaccgttttgccaaggtactgatggaatacggattcaccaccattgtccgcaaaacacgcggtgatgatattgacgctgcctgcggacagctggccggtgatgttatcgaccggaccaaacggacactgaaaaaacgcatggccggtgaaccaatctctgtcaaagcagtctgacagtaatattaagtaacactccccggtgactgtttacgttaatatacctgccttacagacaaggaggcagtatgataaggacgtattccccaggattaattgcagtaatgctgctggcaggatgccggacagcacccgtgacacagaccgtaccggctgcgaccggtacccgtcttgcactgggtgaggcttatcttcaggccggccggtatgatgctgcacggtatcattttgaccgggtactgaaagcacagccgcagcataccggtgcgctgacaggcgcggcgctgagtgcaaaatgcgatcagcagcctgaaattgcggaaaaatacctgaatttagccgtgaattccccgtcaggcagtgatagtgtggtacagtacattttggcttatgagtgtccgccggataacagtctgtaaaacaatataaaagtgatgttgttttcaggattatttttatcattacgggtggcatgcagtatgccggaatacggaacttcggtgcgcggaagggcagatctccgcgctttctcgtaaccagaactgtttgtgtcctgaaactcatgaataactctcaatctcaagataatctccaactcactcttggccaattcttaacacaacgtcgggaacaacttcagttatcacgggaaacagtcgccgacagactttgtcttaaactgactacagtgcgtgaaatcgaagaagatgcactgaaagaaggcaacccgacctttatccgcggttatgtccgtacgtatgccaagctgttgcagatccctgaatctgcgatcatgccttatcttgataaaatcgcccccgctcagatgaccaaagtccagccgatgaaaagtgtgactatcggccgccagcgtaaaaaacgcgaaggctggctgatgaagttcacctggctggtactgctggtggttctggcgctggttggcgtgtggtggtggcagcagtatcaggcacaacaggctgatattgcttcactggcacaacagaatgatgtcaccgtgaatgctccggcagatgttccgggtaccgatccggcagacagcaccgcaccacagacactgaatgcccctgccgggacgccggacaccgctccggccggtaataccaataccgctgcactggaattatcggcagccaccccgcaggatcaggaaattgacagcagcaagattgtgccgctgccgggcagtgaccgcgtaccggcggttgttaaccgtgccgtagacagtgaaggcggcacgctgccgaccaccacacagacacaggatggtctggttctgacctttaaaaacacctgctggctggaagtgacagataacaaaggtacaaaaattttcagcggcaccaaacagaaaggggataccctggaatttgcgggcgcagaaccttaccgtctgaaaatcggcgcaccggctgccgtggatgtgcagttcaaaggtcagagtgttgacctgagtcattttgttaaggcaaaccgggtggcaaacctgagtgtgccgaaagccggtgaataattggtttataaattaaatctttactacacaataaacacagcaatgattaaggacacaaggatgttccggagaaagacttatgcataatgaatccccgataaaaagacgcaaatccacccgaatttacgtgggaaatgtgccggtcggtgatggtgcaccaatcgccgtacaatcaatgacaaacacccggacaacggatgttgaggcgaccgtcagacaaattaaatccctggaacgcgtcggcgtggatattgtccgcgtatcagtaccgaccatggatgcggcggaagcatttaaactgattaaacagcaggtctctgtaccgctggtggcggatattcactttgactaccgcattgcgctgaaagtggcggaatacggcgtggattgtctgcgtatcaacccgggtaatatcggcagcgaggagcgtatccgtcaggttgtggattgcgcccgttattataatatccctatccgtatcggggttaacggcggttcactggaaaaagatatccaggaaaaatacggcgaaccgacaccggaagcgctggtggaatctgccatgcgtcatgtggacattcttgatcgcctgaattttgaccagtttaaagtcagtgtaaaagcgtcagatgtgttcctggcagtcggtgcttaccgtctgctggcacagaaaattgatcagccgctgcacctgggtattaccgaagcgggcggcgcacgtgccggttctgtgaaatccgctatcgggttaggtatgctgctgtcggaaggtatcggtgatacgctgcgtatctcgctggcagcggatccggtggaagaagtgaaggtcgggtttgatatcctgaaatccctgcgtatccgttcgcgcggcattaactttatcgcctgtccgacctgctcccgtcaggagttcgacgtgattggcaccgtgaatgccctggaacaacggctggaagatatcatcactccgatggatgtgtcgattatcggctgtgtggttaacggtccgggcgaggcggaagtctccacactgggtgtgaccggtgcgaaaacccgcagcgggttctatgaagatggtgtccgtcagaaagagcgcctggataacaccgatatgattgatcagctggaagcgaaaatccgtgccaaagcggccatgctggatcagaataaccggattgatatcagtctggttgagaaagaataatcgcggaccggctcattattgatgagccggttttgtctgttttggcagatatgctgttttaagacgatatatccgcctcccgatattgcacccgcacagggtcgcttttataatcggaaacatatttcattgagttaagagaattaacgtggcgacaaaaatccaatctgttcgtggtatgaatgattatctgcctgctgatactgcggtatggcagcgtattgaaaacacgcttaaacgcattctgacaagctacgggatcagtgaaatccgtacgccgattgtcgagcatacccccctgtttcagcgcgccatcggtgaagtgactgatgttgttgaaaaggaaatgtactcttttcaggaccgcgaagaaaatgtgagcttaacactgcggccggaaggaacagcgggctgtgttcgtgccgggatcgagaaaggcctgctgtacaatcaggaacagcgcctctggtatatcggaccgatgttccgccacgagcgtccgcagaaaggccgctatcgtcagttccatcagctgggtgcggaagttttcggcctgagcggtccggatatcgatgctgagctgattatgatgaccgcccgctggtggcgtgagctgggcattgcggagcatgttaccctggaactgaactcaatcggttcgttacaggcgcgtgcaaactaccgtgaagcactggttgccttcctggaacagcacaaagacaaactggatgaagactgcaaacgccggatgtacaccaacccgctgcgtgtgctggattccaaagacaaagttgttcaggaactcctgaacgatgcaccggcactgtttgattatcttgatgaagaatcaaaagcccactttgacggcctgtgtgccatcctggatgctgccggtattcagtaccgcatcaatcagcgtctggtccgtggtctggattactataaccgcaccgtgtttgagtgggtgaccaccgcactgggttcgcagggaactgtctgcgcgggcggccgttatgacgggctggttgaacagctcggcggtcataataccccggcggtgggttttgccatgggtctggagcgtatggtactgctggttcagtccgtcaatccggactttgtgagcgaaactgcagtgaccgatatttatctggcctccttcggtgaaggcagccaggttgcggcaatgatgctggcggaacagatccgcgacagcctgccggatgtgcgtatcatgaccaactacggcggcggcaactttaaacgtcagctgagccgtgcggataaaaacggtgcgcgcatcgccctgattttaggtgaggatgaaattgccaacgggacagtcactgtcaaagaactggccaccggtgagcagcagacgctggcacagagcgggctttccgctcgtctgagcgaacttttaggttaaggagagacgtgtggaagtctataccacagaaaatgaacaggtatcagcgctgaagaatttctttgtcgaaaacggcaaagcaatcgcggcaggtttgatcatcggtatcggcggtattgccggctggaactactatcagtctcaccaggtcagcaaattacaggatgcggcgattgcctatgaaacggcgatcacagcaaaaggcactccggcggagcagaccgcccgtctgcaggcttttgcgaaagaagccaataacaactacggtgctatcgccggtcttgatctggcgatgaaagcggttgacagcaacgacctcccggcggcagaaaatgccctgagccaggcgctgacaaaaaccgataatgaagatttaaaagatctgattaatgcacgtctggcccgtgtacagctgggtcagaaaaaaccggatgccgcgctggcgaccgttgcggcagtgaaagggaaaggctgggcggcttacgcacaggatatccgcggtgacgccctgttacagaaaggggatgtgaaaggcgcgcaggaagcctacaccaccggtattcagagtgaaggtgccgggactatcaaatccgttatgacattcaaactcgataacttagccgggtgaggggactctcgataatgcaactgcgtaaaacactgctggtaggattagtcgcctctgtgctgctggccggctgttcaagtgaacaggatactatcgtgatgtcaccactgccggaagtgacaagtcagttcaccccggaaaccgtgtgggataaatccgtcggtgacggtgtcggtaaatactactctcatctttccccggcatgggaaggatccagtgtctatgcggctgaccgcaatggcctggtcaaagccctggataccgattccggtgttgaaatctggtcagtgaatctggcggaaaaaaccggtttcttatccgcggatatcccggcgatgttatccggcggtctgaccgtttccggtgaacacgtttatgtgggtacagagcgcggtacgctgatcgccctgaacgcgaacgacggtgaaatcgcatggacagccaacgccggtggtgaagtattgtcccgtccggaagtcagtgacggcctggtgctggtgcataccggtaacggcctgttacaggcatttgataccgcgtccggcgaacagcgctggagcctgaacctggataccccaagcctgtctgtccgtggtgaatcagccccggctgtggccatgggtgcggcatttgtcggtggtgacaacggtcgtgtcagtgcggttatgctcggccagggtcagattatctggcagcagcgtatttcccagacaaccggtaccaccgaaatcagccgtctgaatgacgtggatatgaccccggttgttgctgacggtcgtgtttacgctatcgcgtataacggcaatctggtggcgatggatatgcgcagcggtcagattctgtggaaacgcgatttcggttcagtcaacgaactggtgctggatggcgaatccctctatgttgttgaccaggatgataacgtctatggtctgcgcgcagcggatggcgtcaccatgtggtcacaggataaattactgcaccgtaatctctccgcaccggaaatctttaacggctatctggtcgtgggtgacggtgaaggttatctccactggctggatacctccaacggacagttcgtggcgcagaataaactgaacagttccggtattctcagccgtccgtcgattgccggtgataaactgatggtgcaggcccgtgacggacgcctgtacctgctccgccgctgacagtaaaccgctgtttccggcatcactccggcagggtaactgactgcggagtggtttcattgacggctcctgaatgacaggggccgtttcgtctttaatctcctgtatggtgcaggggattttttcagtgttatgaggcagtaaaagcatgatacctgtcgttgctctggtcgggcgtcccaatgtcgggaagtccacattattcaaccgcttaacgcgtacgcgcgatgcgttggttgctgatttccccggcctgacgcgggatcgtaagtacggtcgtgcagaggttgagggacaggaatttattattatcgataccggcggtattgatggcacggaagagggcgttgaaacccacatggccgcacaatcgctgctggcgattgaagaagccgatatcgtgctgtttatggtggatgcccgttccggcctgatgccggcggacagcggtattgccaaacatctgcgcagccgtgataacaaaaccacctttgtggtggcgaacaaaatcgacggtatcgatcaggatcaggcgctgggtgaattctacagcctgggtctgggtgaagtggtgcctattgccgcctcgcacggacgtggtgtcagtcagttgatcacccgcgcactggtgccgttctacggcgagccggaaagtgaggatgatgatcgcgagttaaccgaagaagaggctaacgccgcttactgggcagagcaggaagccctggcacaggcagcagaaacggaagacagcgaagaggaagatgatttcaacccgattgatcagccgattaaaatggcgattgtcgggcgtccgaatgtcgggaaatccacgctgaccaaccgtatcctcggtgaagagcgtgtagtggtttacgatatgccgggtaccacccgtgacagtatctatatcccgatggaacgcgacggacgtgagtatattattatcgatactgccggtgtgcgtaaacgcggtaaagtgactgaaacggttgaaaaattctccgttatcaaaacactgcaggcgattgaggatgcgaacgtggtgctgctggtgattgatgcccgtgaagggatttcagaccaggatctgtcactgctgggctttatcctcaatgccggccgttctctggttatcgccatcaacaaatgggatggcatgaccgcagacgatcgtgagcacgtcaaagatatgctggaactgcgtctcggcttcgtcgatttcgcccgtattcactttatctccgcgctgcacggcagcggtgtcggtaacctgtttgactcggtgcaggaagcgtatgactgcgcgacccgccgtgtcagtaccgcactggtgacccgcatcatgaaaatggcagcggaagatcaccagccgccgctggttcgcggccgccgtgtcaaactgaaatatgcgcatgcagggggttataacccgccgattattgttatccacggtaaccaggtttcggatttaccggatggctataaacgttacctgatgaactatttccgtcagtcactgaaagtgatgggaacgcctatccgcatccagtttaaagagggtgaaaacccgtttgcggataagaaaaacgtgctgacagcgacccagctgcggaaacgtaaacgcctgatgtctcatatcaaaaaaggccgttaatcaggaaaacccgcattttttaatgcgggttttttattttccggcattttacggctccagcccgacggctttccatgcgttcatcagcacagcagtcacttcctcatcatagttctcatcagcgatagtcagggtttcgcgggcgaaggtgaggaaattacattccggcggcaggttgcctctgcgcagcgtgtcgaaccagatctgtccggccacttcccagctgtacccgccgagggcggaggcgaagtggtaaaatgcatggttcgggatgccggagtaacaatgaacgccgccgttatcattctccgggtcatccggcagctcaatataatctctcatatgtgctacctgtttatctttgccgatcaccgggtgattataggcatttcccggtgacgaaagggagcgcagtgctttaattccgctttgtttattaaacaatgttctgccgatatgccagtccccctgatggctggcgtgacggcggtggtaatgacccagcatgacggtaaacacatcacagaccgattcattcagagcaccggactgatggctgtaagtcagcggggaaaggtgatcaatcacagcgtgggaaaattcgtgtgtggcgatatccagctgggcaaaactcagaaacaggggagtgacgctcattccggcatccccggcaccaaacaccagatgtgcgccgttccagaaggcattgcagtagccgcgtccgtaatgtgtcatggcggagatagtggcattgttgtcattaaaggatttgtaatcaaagatatcatcaaaaaaaccgtaaatgatatcaagatactcaaacatattatcggtatctgtatcctgccgcacaggcatatgtggctgtgggttttctgctttccggtcttcgcggtaatacaggtccggaacggtggtcaggtttttcagatgcatcacccggcggtgtgcctgcgaagtacatccggattccggcagagcagcataactgagaggcatcatttctgtttccggcaggcgtcggtaaccgagcaaccgctgcatatgctgataacataactgtgtctcttcgtgatccccttcatgaagcaggcgttttttcaggatccagggcggtaaaaatgaatagcgcggggcatgtgctgacataggcggttctcctgtggttggaatgaccatctttacggagaaaaatatttaccgcagcagactatcagcctgcttttcagtcagcacactgtgaagggttgtcagacccagtcacggggaataagaaaatcactcagtgcggcttccggagaaccgggctgcggctggtagtcatattcccagcgcaccagcggcggcattgacatcaggatggactcggtccgcccgccgctttgtaaaccgaagaatgtgccgcgatcccacaccagattaaactccacataacggccgcgccggtagagctgaaactggcgctcgcgctcaccataagggatggaacggcgtttttccgcgatcggcagataagcccgggtaaagccgttgccgacagcctgtgtgaaggtaaagcattcctcaaaaccgggtttattcagatcatcaaagaacaggccgccgataccgcgcgcttcgctgcggtgtttcagataaaaatagtcgtcgcaccattttttataacgcggccaggcatcttcgcccagcggcgtgcagatatcccgggcgacactgtgccagtgtacggcatcttctgtgaaaggatagaaaggagtcaggtcaaaaccgccgccgaaccaccagaccgggtcacagccggctttttcggcaataaaaaagcgtacgttggcgtgtgcggccgggacatacggattatgcggatgaagcaccagcgaaacccccgtggcctgatagtggcacccggcgagttccgggcggtgtgccgtggcagacggcggcaggctttccccgctgacatgtgaaaaattaacaccggcctgttcaaacagtgcaccggatttcagtacccggctgcgtccgccgccgccggactcccgctgccacttatcttcggtaaactcagcaccggcgtcacaggtggcgagttgtccgcagagggaatcctgtaatctgagaaaaaaatctttaacactgtcactatcagggatattcattacatcacgaccattgagctgctgataaactttagtatatcattttgtttttataagatatcacacccgttccgtcacggacacgggcagacaaccggcagacaggtaacggtatggacattcgcacatttcagcaaggtgattttgaagaggttgttgcgctctgggagcgttgtgatctggtcacccccccggatgacccggaaaccgtgattgagcggaaaatggcacatgatccggccctgttcctggtggcggaagtcaacggcgaagtggtgggcacactgctgggcggttatgacggataccggggctatgcctattatctggcagtacatccggaatttcagggacgggggattgccaatgctatggtggcgaggctggaaaaaaaactgctggcgcggggatgtccgcagttgctgctgtcgattccggatgataataccgccacgctgagcatgtttgacaagctggcctacgacgagtgtcagcaggacagcctgacctacagcaaacggctgatcaccgacccggaatattaactgccggggttgaccacactgagtgtatcggcggttaccacaatcgcatggcggtctttttccattccgccttcaatgcggatggtatcattaggggtgataatctttttcccccataattccgccggaatttttacctcgacgataccgctgtaatcccccagcagatagtgctccgctgaaatctgagactgaatattaccttccagaatcacccggctgttatcctgcagatagggcagttgtttgatgataaagcgctgtggtgtttcacattttactgtgctctgatgatactcataggcagaaaatgacggcagagccgcagcaggctgaaaccagaatgtacctgtcagaacaaccgctgaaaacaggtaaaaagtcgatgatgtgaatgtcatttcagccatagcttacgacgccggtaaatgaaaaatgtcggttatataccaggagatatcttatcggaaatgttacgttactgaattggtaaacatacctatttcgttaaaattatttgatgtaataattcagaatgaatgttttgtcaattccggagtctgatatctgaaccgaatgcaaaggagcaatgaatgaagtgttatcaggcaatgaagctggccgccgcggccggtgccgtactgatgctgaacgggtgcagttcgttttcatggtcatcattatcgccggtaagctggttcagcagcagtgggctgacggtaacggcacagggcgtcggtggtgtgaataatcagacggccatgaccgaaacggcgatcagtcagggactggacgataaatacacactgcgcggtggtatgcagaccgagcaggggcagatcgttaaaatttttgaaggccggaaagatgataaaacggttatccgtctgtccgggccggaaaatggcactgtgcagcgcattgttgccaatgatgcggatatccgcacggaatgggacatcaaaacaggaaccctcttttcggacatctatccgcaggccgttgccggtgcctgtaccctgaccactgaatttgatgacagcgcacaggttatctgccgttcaccgcaaaccccgcgtgtttcctatgttttccgcggaacctggaacggccctgaaacactgatgccgtcagatgatattctgaaaaactggacagtcagttatatcgtctgggccaataaataatccgtaaaaataaatgaacttgcggaataacaaagtaattccgcgtcagtgatttatgataaggccatttcctgatcagactgacgatgcaaagggagcaatatgtcacaagcacaaagcggtattctgccggaacactgccgtttcggtatttttattgaagcaaacaccaaaggtgatttaccggcgatccggcgtggttgtcaggttttcctggcagctctgaaaaagttacagacacagtttgcggctgatcaactgagtgccacggtggcattcggtcatgacctgtggcgtcagctgggcagtcagagcagtgcaccggagctgaaaaacttccgtgaactggggcgcggcctggcgccggccacacaatatgatttactgatccacattcattctcagcgtcatgatatcaacttctcgttggcacaggcagcggtggcggcatttgcggatgcggttgagattcagggcgaaacccacggcttccgctggacggaagagcgtgacctgagcggttttatcgacggcaccgaaaacccggaaggggatgagcgcccggacgtggcactgatcgcagaaggggaagatgcgggcggcagttatatcctgactcagcgctgggcacacagcctgaataaatggacccgtttttctgaagagcagcaggaaaaaatgattggccgcaccaaagcagacagcacagagctggatgaaaatgtgcgcaatgtaacctctcatgtttcccgcgtggtgattgaggaagagggcgaagagctttccattctgcgccagagcctgccgtacggcactgccagcggtgagcacggcctgttctttatcgcgtactgcggtcgtctgcacaatattgagcagcaattgctgagtatgttcggtgaaaccgacggtaaatttgatgatctgctgcggttcagtaaaccgaaaaccggggcttattattatgcgccgtcgctggaacaactgagtgcgctgtaagagggtgtcactttaagcccggaaccggctgataacgggcaaaaacgaaaagtcgctgtgaatacatccctgtaagctcaggcgcgccatccgtagcgcgcatgcttttcgtttcctttgcccgttatcaccgtcatacttttcccgcagtgatgcacatttttgtgtctgtttttatccttattcctctgtaccttcccctgaaggcaacctctatccttcgtgtatacacaacacaggaagagaagaaacatatcgatgcataatatcgtgaagtaaataatcactatatataattccataatgatataagtaaatggcttgtgtcactttacggatatatgcacactggccggagttacctgaaacgcatcatcataatgaggttctccgccgtgaaactgtctgtcaacgctgtattacctgccggtctgctgctcctttctgctgtatggagcggcgctgccggtgctgctcagttactgaacagctcctatgatattgcccgtgagctgttcacggaaatcaacccgctgtttgaaaaacagtggaacgcggaacatccggacgatccgctgactatccgccagtctcacggggggtcctcaaaacaggcgctggcgatattacagggactgcgggcggatgtggtcacttataaccaggtgaccgatgtgcaggttctgcatgataaaggtaatctgctggcagcggactggcaggcgcgtctgccgaataacagttctccgtattattccaccatggctttcctcgtgcgcaaaggcaatccgaagcagatcaaagactgggattccctgctgcgtgatgatgtgaaaatcgtttttccgaacccgaaaacttccggtaacggtcgttacacctatctggctgcggaaggtttctggcagcagaaaaacggtaaaaacagtgctaaaacacaggaacaaatgaaaaaattcctcagcaatgtcgcggtatttgataccggcggtcggggagccacgacgtcatttattgatcgcgggctgggcgatgtgctgatcagttttgaatcagaagtgaataatatccgcaatgaatatggcgcggatgattatgatgttatcgtcccggcgtccaatatcctggcagaattcccggtggcgcgggtggataaaaacacggaaaagaacggcacacaggctgttgctgatgcctatctgactttcctgtacagcccggcggcgcaggcaaaaatggcgcagtttaattaccgggtgactgatccggatgtgatggccgccaataaaggccatttcccgccggtgaccttatttaaagtggaagatcagttcggttcatggtctgaagtaatgacaagccggttcaattcaggcggtgaatttgacaccctgatggctcagggacgctgatatggcaagacgggtgttgccgggatttggcctgtccctcgggtttacgctgctctacagcggactgatcctgctgctgcccctcactgcactggtattacagctggcgcagatgagctgggcgcagtactggcaggtgatcaccggcccgcaggtggtcgccgcttataaagtcacactgctcgccgcgcttgctgccagtctgtttaatgcagtgtttggtgtgctgatggcctggatcctgacccgctaccgctttcccggctgccgtattctcgacggcctgatggatttgccctttgcgctgcccacggcggttgcggggctgacactcgccactctctttgccccgaacggctggtacggccgtttttttgattcgtttaatatcaccgtggtgaatacctggattggtattgcggtcgcgatgatgtttaccagtatcccgtttgtggtccgcacggtacaaccggtgctggaaactctgaaaccggagtatgaggaagcggcagaaacgctgggtgcttcgcgttttcagatattctgccgtgtgatctggccggaaatcgccccggcagcgctggcgggaaccgttttgtcctttacccgcagccttggtgagttcggtgcggtgatttttatcgccggtaacctggcgtggcagacggaagtggtgtcattcctgatttttgtccgcctccaggagtttgaatacccggcggctgcggcgattgcctcggtggtgctgatgacttcgctggtgttattgctggcggtcaatattattcagagccgcgccggattgcgtaccgggaggtctcatggctgatacactacgccgccggcgtttcccttggcagaagtggctgctgatttctgccgggctgctgctgacatttttcatcctggttattccgctggtgtggatttttgtgaccgcgctgtctgatggtatcggcggtgtgatccgcgcactggcggaggcggatatgttgcatgctatctggctgacagtgatcgtagcgctgatcaccgtgccggtgaatctgattttcggcacactgctggcgtggctggtaacacggtttcattttcccggccgccagttactgctgacactggcggatctgccgtttgcagtatcgccggtgattgccgggctgttgtatctgctgctgtacggctcaaacagctggctgggtggctttctcgaaaactcgctgaatacccaaatcatgtttgcgttgccgggaattgtgctggtgacgattttcgtaacctgtccttatgtggtgcgggaactggtgccggtaatgctcagtcagggtgcacaggaagaagaggccgccgtgctgctgggggcccgtgcatggcagatctggtggcgggtgacactgccgaatatccgctggccgctgttttacggtgtgatcctgaccaacgcccgggctatcggggagtttggtgctgtgtcagtggtctccggcgcaattcggggagaaaccttcactttaccgttacaggtggaattattgcatcaggattatcagaccgtggcggcatttaccgcatccggtctgctggcgctgatggctgttgtgaccctgtgtatccgccacggcgtgatggcatatcagggatcccggaggaaatatgagcattgaaatccgtcatctgacacaccatttcggtgcggagccggtattgcaggatatctcgctgtcggtggcggacggcgaaatggtggcgctgctggggccttccggctccgggaaaaccacactgctgcggattattgccgggctgacccctcatagcgccggagaattgtatatcagcggagaagaggtttccgggctggcggcaggcgagcgccgggccgggtttgtcttccagcactatgcactgttccggcatatgacggtgtttgacaacatagcattcgggctgacggtattgccgcgtaaaacacggccatcaaaaaaagaaatccgcgctaaagtgatgtcactgctggaaaagattcagatgccgcacctggcggatcgctatccggcacagctttccggcggacaacaacagcgggtggcactggcgagagcgctggcggcagagccgcgtattctgctgctggatgagccgttcggtgccctggatgcaggggtgagaaccgaactgcgccgctggctgcgtcagctgcatcagtcgctgggatttactgctgtgttcgtgacacacgatcaggaagaggcgctggaggtggctgaccgcatcgtggtgatgcgtggcggacatatcgagcaggtcgcggtacctgaaagcctcggcaatgatgacagcaaccgctttgtaacagaattcctcggtcagataaacattttccgtggtgatatcggtacggatggcggggtgcggattggcggtgtgcgccagccggttgccgcactgaccgccggtttcgggccggtatcggtatttgtgcgcccctggtcgctgacattgcagcacactttttcagccgatgcggttgctgcccggattgtgaccatccgttcacacgggcattaccgcactgcggtggtaaccacggaagcggctgaagatgaagtgacggtaatattaccgccggacacccgtgccgccgccggtgattctgtctggctgacaatcagggaactgcggctgtttcgcggcgaagatgaactggcgctgctgccgcaggcacagtgcgcataaagatgaaaataattccggttgcatactgccttgcggcggcggtatggtttccgtttatggctcaggaggcagaacaacgtggcatctatcagtaatgggatcggtaataccccgcttttccggcttgcacggctgggtgaagtcagtggcgcagaaatctgggtcaaaccggaaggcaataaccccggcggttcggtaaaagatcgtgcggcgaaaagtatgattgaaggtgccgaacagcgcggggagatccgtcccggggatacgctgattgaagccaccagcggtaacaccggtattgcgctggcgatgatcgcagcgattcgcggttataaattaaagttgctgatgccggaaaatatgagtgccgaacgccaggccgctatgaaagcttacggcgcggagctggtgctggtcagccgggcacagggcatggaaggggcacgggacctggcgcagcagatggcagcggacggggaaggttatgtgcttgatcagtttaataatcccgataacccgctggcccattaccggacaaccggcccggaaatctggcagcagacggacgggcgtatcacgcactttgtctcagctatgggcactaccggcaccattaccggggtggcgcgttatctgaaagaggtcgcaccgcagatcaatatcaccggtctgcaaccggcggaaaacagtcagattccggggatccgccgctggtcaccggggtatctgccggggatttttcagccgcagctggtggatgatattctggatatcacacagcaggaagcagaagatacgatgcgccagctggcacaacaggaaggcattttctgcggggtcagttccggcggcgcggtggccggtgcactgagaattgcaaaagcgaacccgggagcggtgattgtcgccgtaatctgcgatcgcggcgaccgttatctctcgaccggcgttttcggctgagacattatcccgctgttttgccggtgtatttcatgtgcagcagcgggaacggatttccctccccatccagttcagaacggcctgtctgtgtaaaacccatatggcggtaaaaaccgacaccctgcgggttttgttcattcacatccagctcatctgcctgtaactgctcaacagcataattcagcaggaatttaccggtgcctttaccgcgaatagccgcatccacaaacagcatctcaatccggttcgcgtctgtgccgagaaaaccgaggatcacaccgttttcatcctgcgccaccaccacattcaggttcggcagataggtattgagcagcagcggatgcagtttttcaatatcagcctcacataaaaaatcgtgagtggcgcggacagatgattcccagatggcaaccaggcgcgggaaatgatccggtttggcgggggtgataattaacataaagaaatccgtaaacagaggatactgagaatggccggtgtcccggtatcccgggacacgctgcgggtgatcagttattggtataacgtctcttcggggtgcagatatacacccaggctggcggaacgttgaacaatacacgctctttgcggaaatggaaataacggcgcagatatttctcaaatttggtggtgtactgaaacagaataaactgcccgtcgctgagttcgatattgtcacgcaccgctttcagaatacgcagcccggtgcggcggtcaattgacaggaacggcagaccggagaaaatcacattatacgggcggttcagtttctctgctgagtcagaaaaaatccccagccggccatcctgaaatttattcagcaggctgacaaaataggggtcaatttcataggcatccagtttagccagtggatccatctgatccagaatctgacgggtaattaccccggtaccggcacccagctcagcaaaatgctgcacaccgctccagtcgacgtgacggaccattgcacggcacagccagcgtgatgaaggggtaattgttcccatcgtggccggcgatgcaataaactttttgatgtacgcgtaatagctcagtaacggtgaatagtttgatacttccataataagcattccttacaaacccggatacaacgcacgtgtaaatagtcacgtcagtgaaatgtattcaatatcatatgccgattattctctttcctctacagataaataaggaatttttcagacggtgaaaaaattaaaaagttcataaaactgtcatataaaacaaagcaatagggtgttttattttagtttttaattaacaggcagataagattgatttgttataaacaataatcagatgaatgaatgagatagctgacagggaaagcatagcggattaaaaggcggttagtacaggaatgaacgcgacttttgcaaaagctgacattaacggaataaacatgacactccgtaccggtatattattctggtaataagccggtacggaataagaattaactagtgatgtatttttccgtgatccattatcgcctggcggaggcgctgctgtaattcataacgctgttcatacggcagcgggttgctgtcacccaggctgaccatcatttcgttcatttcagtgatactgttactctcaatggctttttccacatcagcaacactctgtgcataatcgctcatacggctgtccttattcagtctgatagtaatgcggttatcctacctgaacagcggtaaaagcgttagtgcaaaacggcggtgatcaggccgcgtgatcattgtggcgggacggcggctccagcggcggcaggccgtgtgcggctcttgcccggtcacaggcggcattgtgtacaccgctgacccacgactgatcaaactcgcggcacggcgacgggcgctgtgcgtaagcgctgcacgctacacactgaccgacttccccctgaagattgatacagcgcggggatttctgatcagtgcctttcatacaggccataaagtcattcactttttctgtcatctctgccggcaccacgccgcccgtactgtccgtttccccgtgataaaacgagacccggaaataggcacagcacgccccgcactgcatacagggattggtgtccgcatcagtaaacgcaattacattgctcatgatagttaaccacattatgcaaacgcggtgattatttcaccgcaggccgagttttgtcctgaataagctctcagggcggattattatttttattttgccgcgcaaattcaataaaaataaacagcagcagatcacaaaataatgaatgaaattaaaataataattctgcttatgaaagacaggaaaaataatttactgcatataaaggtatatttctgtttttaaaagataaagtaaatatccctccggcggtctctctctgcacgatatgctgctgagtctgataaccggtaccgtaatgcaaaatacagcacggtacggtcttttccgttatgctgtagccctgttaatcagtcgctgagaatataatggaaacggatgatcgcctgcgctgcctgaaacagttgttacagacttacaccgcagagcgcagcggcgggtgggatacgaccgttcccggtctcgcattgtgccggtggacggctccgtcacaggcgcaaacctggacttatgagccgggtatcgcacttgcggttcagggcgcaaaacggatcacactcggagataacacctattgttaccgccccggggatgtattgctgacatccgtggatatccctgcgattgcgcaggtctgtgaggcatcagagcaggcaccgtttctggctctgctggtcagtcttaacctcagcgaccttccggtactgatgcaggaaagcggttttcagctgctgacttcagaacccgctgtaccgcaggcagtgtgtccggtcacagaagcgttgctcagtgcggtctgccgcctggtggcgctgctggaaaaaccggacgatatcccggtcatggctccgcttatccataaagaaattctctattacctgctgaaaagcggccagggcgcacggctccagctgatggccgcacataataaacagtgccgccagataagcggcgtacttagttacctgaaagcgcattttgatcagccggtgtcggtggagacactctgccgccgggctcagatgagcgaatcctcttttcaccgccatttccgccgggtcacccggatgagcccgctgcaatatcagaaatggctgagacttaatgaagcccgtcgccttctgctggtggaatcggcggatgcctcggaagcggcttttcgtgtcgggtatgaaagtgcctctcagtttaaccgtgaataccggcggttattcgggttacctcccggacaggataaaaagcgggttcttctctgaccggtgtgtgatttccgggcaaaatgacaggatcaggcaaacatcagagcggacaggctaacgtatttgcgggacaggccggttaggataacaggattgacgacatcattcctgagtgagtaacacaatgaaaaacatctttattattaacggttcaaaagaattcggcggctctgacggcaaactgaacgaccatatgaccgatatcgcccgccgccatctgacagaaaaaggcatgaatgtccgcgttacccgtattgatgacggttatgacgatgaacaggaagtactgaattacctgtgggcggatgtgattatttaccagatgccggcctggtggatggaagggccgtggattgtgaaaaaatacattgatgaggtatttacacagtctgatgaccgttttcatattaatgacgggcgcagccgccgtgacagcagtaaaaaatacggctccggcggtgtgctgaccggtaaaaaatacatgttatccgtgacctggaacgcaccgcaggaagcctttgaggatgaaaagcagttctttgaggggcggggtatcgacagtgtgtatttcccgctccacaaaaccaatcagtttaccgggatgacatcactgccgacattttcctgttttgacgtggttaaaaacccgcatattgatgcggatatttgccgctatctggctcacctggatgtgaatatcgcaggctgaaccctcagcgggccactgatgccaggcgcagaccgagagcgataaaggtggtaccgacgaggcggtcaatccagtaatgcgctttcgggctgccggagatccgtgcagccagtgtcccggcaatcagtgccagcgtggtatcagtgcagaacccgagcagggcataggttgcgccgagcagcaggaaagattccgcataataactgccgcctgccgcaataaactgcgggaaaaaggcaataaaaaacagcagcactttcggattggtcagtgtggtgataaacccccggataagaatcgattttgcggctgccttctgaatcaccacttcttcattatcatcagcggtctgcccgcgctttctgagtgtgccgaggatcattttggcgccgaggaacgcaaggtacagcgcaccgagatacttaatcacggtaaacagtgtcggcgatgcggcaataatcgcccccagcccgacagccccggcaacagcatgcacactgctgccgagcatcacccccagcgcggacaaaataccggctttgcggccgttggccaggctttgtcccagtacataggcaatatccggccccggcgttactgcaaagataaaaacggacagtaaaaacagcgggtaatggataatatccagcatgtgacagccctccggagtcagagaaaacgttatattatggcggatataatgccattaagtatgatccgctggcaaatgacatttttgccggttatttatacgcgtatattgatttgctgaattatataaacttgttcaatatttataatgaattactcactttataatttatcagtgttaaaaaacgggcggaaaaagagtacgcatcaaaagagtgtttccggatggcagatagtgtaacaaaacgtaaaagcacggctttacatccggtaaagtgtattatactcagctgcaccaatggtaccgtatcatcaattaattagctgaattaaaagatgatattttacttttggccttgtttttattgtggatatcgccggatatctgcgaacttatttttcattgtaaatgataattatctgatacttatcactgtatgcgcggtttatgcggataaacaataataacaacctgataccgttgatttgtgacaataacggcagtgattaatcggaatttcttatcaacgggtgaccggaagccgtcggttacccgacgatatatgtgacgccggaaaaacagattccggcgcttacaatccgcaggagattgcagttgaaacgcctatttttcagacaacggcgacgccgtttgctcatcatattacttgttttcctgacgattctggcaggttacggggtatacaacgccattctgatgaaggcaaaaggcgttgaagaacattacactcaccgcggagagattaaacagtattctctccgtgacggcagccagctgaagctggataccgaatcccgtgctgtggttgcttacgataacggcagccggtcagtaaaactgctgtccggacgggcacgttttgccgtcagcgaaaaccgtgaagaacagcgtccgttcctggtcaccgctaatggtgtgcgggtggaatccggcaacggtaactttgtggtggatattgcggataataaagtctccgtctgcccgctggatgaaaccgtgaccacgttttttgacggtaaaaccgaaaccgtggggccgggacaacggctggagattctgccggaagggcgggcaaaagtattccagcgccagtacaccgatatcgactggttatccggctcactggtgctgaataatatcccgctgtcagaagcgattgagatgatcaacagttaccgcgcggtgccggtagttctgctgaataatgataagaaagatattattgtggatcgtgtgctgcatctcagccgtctggatgaagaggttgaggagatgatgcgttccctcgggctgacccgtgaatcgctgccgggctcagaggcttaccgctgagttgcctgtccggcgataaaatctgactgtccggcaacagcggcggtgtctgatcaccggtataatgatgcggaatattaccctgattaaccactgtacagcagccggagagaccgatgacatcagcagaaattgaatgggccgattttgaaaaagtggaattgcgtgtcggtgtggtactgaccgcagagcttaatccgaaagcccgcaaacccgcctatatctttactgtggattttggagagtgcggggtgaaaacctccagcgcacaggttaccgcattatacaaaccggaagaattaaccgggcgtcaggtattatgtgtgtgtaattttgccccgaaacgggtggccggagtgaaatcagaagtgctgataaccggcgctgctaatgcggacggagatatcgttcttgcggagttttccctgccggtacctgccggtcaccgcctgatgtaacaccccgccgcctgtcgttttccgtactctcaggggcattccatgaaacgacctgttatctcattacgtagctaccggcaggaaaccctggagcacagtcatgatgacatgtggcaactggtgctgggcggcagcggcgcaatggaactgactgtcggcagcgacagcggttcggtggagcagggacggatggcggcgatcccgccggggtatcaccaccgtttctgcggcaccggtcataaccgccaggtggtacttgaactgcctgcggacagcctcttcttcacttcccctgattctctgtggtctgtgctgccggatgccacccgtacttatgtggactggcttatcagttatccgcagatgattgaacagcatccggaaagtgcgcgtatcctgctggcagagcagcttgcggcgcaactgcagccggacgggcaggacaggcgctggctgcatactctgacacaacagctgaccgcgcgtcctgattacccgtggacggtcagtgaaatggcgtcgtgctgtgcactatcggccagtactcttcagcgccgcctgctggcggccaccggtaaaaccccggcggtttttctgactgaaatacgtctgcgccgggcacatcatcttatctgccataccccgctgacactgccggaaattgccctgcgctgcggttacagtacccaatcttccctgaccagtgctttccgccgcttttacggcgatacaccggccagtctgcgcataaaaaaagggtgagccggagctcacccttttgcttttgtacattatttcaatcaggcagatttgttgtctgcgctttgcagcattttgcgtaccggcacaatcagcacacacagcactgcggcacagataagcagggcaacagaaacgtgtgagaagaagcccggcaggttcatcagctgatccggacggacattaccgcccatgataccggctgcaaggttacccagcgcactggcacagaaccacagacccatcacctggccgcgcattttcatcggtgccagcagtgtcatggtcgccagaccaatcgggcttaagcacagctcacccagggtcagcagcaggatactgaaggtcagccacatcggggagacaccggcgctggtttcaatcacgcgctcggacgccatcatcatcactgcaaaaccacccgcagcgaacaggacaccgaacataaacttggtgatactgctcaggttcatattacggcgcgccagggcaggccataaccagctgaacacgggggccagtataatgataaacagggcgttgatggactggaaccagacagtcgggatttcaaaaccgaacaggttacggtcagtgtaatccttcgcaaacagattgaatgacgtcggtttctgttcaaacgcagaccagaacagggcggcggtgactaacagaataaaacagacaaataaccggatgcgttcactgctttccagaccggcaaacacaaacaggtagatgaagtagagaataaccatcccggagatgaggtaaaccatgttggtggcaaccagcatcgggttgaacgggataacgccggaggcgatcaggacagtgacagcggcgataaccacagccgccaggccaacccacttaccgacatttttgcgcgcgacagtcgggcgatcccagctggagtccagacccacttcaccgtcatactgacgcatcagcggtaccgcgtagaagcggaacaccagcagggccactaacatccccagaccaccgataccgaagccccagtgccagccgaagttagggactaaccagccggtcgccagcggcgcgataaaggagcccatgttaatccccatgtagaacagggaaaaaccgccgtcacggcgtgtatcgtcctgtttgtacagcgtaccgaccatgaccgtcacacaggttttaaataacccggtaccgataacgataaacagcagaccgacaaagaacagctttggtgaccagattgccgacagggcaatcgagaggtgaccgagtgcaataatgattgagccgtaccagaccgccatgcgctgcccgagccagttatccgccagccagccgcccggcagggaggtcaggtaaatcgcaccggcaaaaataccgacgatagcggaagcctgttcacgcggaatatccatcccgccttcatagacggtggctgccataaacaggatcagtaacggacggataccgtagaaggagaagcgttcccacatctcggtaaagaacagcgagctgagcgggtaagggtgcccgaagaaagtacgttttttgtttgttgttgattgcatctgtaatttcccaaaggtttattccggagaataagcctgaaaatggtaaggataaacagttcctgttaacaaaatgatacttttgtgtatcaataaacatcctgtcttattaaagtattattaacacacttatcgtgaatcgtattcacttaaagcacgttttctattttataaaccattttttagatgaaatgtcgacaaaaatctcatttcacaagacttatttatacaaaatgtgatgaggtctattgacagaagatgtggattatgaggcttacgtatatttgcaaaattattttaaatcaaccagttaaagttgactcataacggaaagatgaaatttcagtaacaaattgctgacagcgaaaagtaaccggatgaaaaccggcgatatctacccgatatcggccggtttaattttcggggctctctgcgattttatgcaccaccacgaataaaacagattaaacagtacaaccgcagcggtgaaataaaagacagatgcgaagccgaaatgcgcagccacccaggcgcccattaacggtcctgtaacattaccggcgtcgcgcagtgcctggttatagctgaaaatccgtccggcaatttcatgggtgatatgataaataatcagggtctggacggcgggcagcagagcggcattgacggcgccgagcagaaaacgcagggcacccagctgccagtaatgggtgacccaggccatcggcagaataacaaacacagacactgccagcatggcgatcagtaccttatccggccctatccggtcactcagttttccgaggcgcggggcgctgatcagcgcggccagccccggcacagaggcaattaacccgctgataaacgccaggttttcagtatgtccgcccagctcacggatatacagggtgataaccgggctgaccgaacctgccgcaatctgaatacacatggtggtgaaaaacaggcagattaccaggcgcggattttttatcgctgcaaaaacctgctttgtgttgagggcatctttgcgtgacaccggcgtgaagttttcgcggacaaaaaacagtgtcacgaaaaagcagataaacagcacgctggcggtgatatagaagacaggacgcaacccggtgtgatccgccagaaaaccgccgataagcgggccgataagtgcgccactgacagcgccggtggaaagcgtgcccagtgcccagccggtgcgtttgaccggcacctgggtggctatcagcgcattggcattcggcacgaaaccgcccagcagcccgagcagggcgcgcaggaacagcaattgccagacattctgtgcaaagcccatcagcagcatgacaatcgccataccgagcgcggagcgcagcagcatcagcttacggcctttgcggtcagagagtttgccccagaaaggggcagcgatggcggaaaacaggaaggtaatactgaatgccgcccccgtccatagattgagttcctcatggtctgtcaccccgagctcttccacatagagcggcagaaagggcatgatcaggctgaaggcggcgccggtcagaaaacagccgaaccacacaacataaagatttcgtttccagttacggttgggggctttgttctgcatcagggtagtaatttaattccttttttaatggactttgtcccggtcatgatagagggacggttcaccttccggccgtgttttgaagcgccgatgcagccacatatattgttccggggcgcgtaaaatttctttttccacaacatggttcataaaggttgcggcagccacatcatcatcttccggaaaaccgtccgcagggggctggatcagcagttcatagccttttccgtccggcagacggcgcggtgtgaacgggatcagtgctgcacgaccggctttgaccagaatagacgtaccggtggtggtggcggctttctccacggcaaacagcggtgcgaacacacttttgcgcgggccgtaatcgtgatccggtgcataccacaaaatctgtccgtcacgcagggcgcggatcatccctttgacatccttgcggtcgagcatggatttgttggatcgcaaacgaccggtggtctgcatccagtccatcaccgggttatcgttcggacggtaaaccccgatgcctggattgagcataccgaaaatccgtgcgcccagttccagggtcaggaaatggatgcctatcacgataataccttgtccggatgcctgtactttctgaatatgttcgcggccttccaccttaaaccagcgttttacccgccagtccggccagaaccaggccatgccggtttcaaacagccccatgccgacggattcaaaatttgccaccaccatcgctttgcgcttttcttccggcatatccggaaagcacaactgcagattgcggtcagcaatctccgcgcggcgtttgagaaaacgcatggacagacgacccagacgggtgcccagccggtaaatcaccggatacggcagcaacaccagcacatacagtacacccaggccaagccaggtcagccagtagcggggatgcagaaacgagcgttgaaattcaggagctgtaatcatagtcagacatcgttattgtttaaagcatcagcagatgcgggttcatgtaaatgatataacactaaattatacgtggtatcggttgcagatgttagtgctctgcggtgctgttttcagcgtccgtaatgctgttgagctgcgtgaccagctccgcgaggctgcccgccgccattttttccatcactttggcgcggtgcacttcgacggttcttaccgcaacatgggcaatatcagcgatttcccggttcatcagtccttgtgcgacaaaaccggcgatctgacgctctttcggcgtcagagtctgaaaacggtcacggattcgggcacaggccacggctttgccggttaccgcggcggcgcgggtcagtgctgcctgcaacggttgtgtggccaccggtttctgcagaaaatccaccgcaccgagtttcatctgttcaaccgccatcggcaggtcgccgtggccggtcaggaatatcaccgccagcgtgctgtgccgctcctgaaggatctgatgcacacggcagccgtcaaaatgcggcatgcgcatatccagtaacacaataccgtaagtgtgcagcggtgcctgtgcaataaatgtccggctgtcattccagacacacacctcataaccgaggctctccagcaaaaactgacacgcctgtgtcacagcaacatcatcatcaaccaggtggatcacgggcatggggattcctttgtcggttcactgaagataagggtaacacataagccgggctgttcgtccgggccggaacaattttccatatgaatatcaccaccctggctgcgcatcaggcgctggcagatcaccagcccgagcccgagtccttcggacctggtggagcggaacggggcaaaaggttgtgtcagctgcgtttcatccatcccgccgccgttatcctgcaccaccagaatctgtccgccgggggggtggtgatgcatcacacggatgcagtccgccccggcctgcaaactgttactgaacaggttggaaagcacctgatccagcagtgccggcggtaagtgtaatacggcatcatgagcaacggtgttatataaaactgcagaaggatatcgttctgtaacccgcagcagtttccagaccagttccggtaccgccgccacattctgcggcacaggtgcaccttccggggaggatgggctgtttcccgcccacagccgcaggttgcggataatactggcaccgcgttcggcctggctgtcaatctgcgacatgaccggcagcagcggatgtgcgggatcttcccgctccagccggatttgcgagccctgggcgtaatggcggatagcggacagcggctgattcagctcatgcgcaaaaccggaggccatctccccgagcacactcagttgctgggctttttccagatcctgctgctggcgctgtaactgtgaatgggcggcttccagctggcgggtgcggcggcgcacccggaaagcaatccacacatgattgataccgagaagcagaaaaaccagggcaaccgagcctaacagccagctgtttttccggctccagctgataatctcctgccagaactgccgctgctgcgggtgctgattgacttccctcagcagattttccacctggcgggtggatgacggcgcaccccagcgcatggttttttcgccgtggctgttaagcagcacccgggtgacttcatccgccagttcgtccggtacaccgctgcccgccgcaaatgaccagttcgggtatagctcgctgctggtccagcagggaatggtgctgtcccgtccgagaagcggccggaaatcatcctggtgaatgagtccctctttatccatggattcaatcaggcaggccggaacaatcgcaccggaaattgccttatcccgcagcagataaagcagggcatcggccggaaaaccggagaactgaagatggtaatcacgcggcgggtcgatacccgcatcacgcaaggctttatagcctaataaatagccgccgaaggcatccggcgcgactgccccgacttttttaccggtcagatccgccggagtctgataagggctctctttgcgcaccagcagcacactgccgatcacattacgggtggcgttatccggctcataagccgaacgcagggagaccagccagcgcaggggaaagttgctgtccagctggataaactgtgccggattggtgaggacaaactgaatctcgttattgtgcagcgcttcccgcatctgatccagcgtcagcggcagcagggtgaagtgttcaccgggcagggcgcggttgagctgctctgtcagcggctcccagtaatgacgtgtcggtgcatccccccgcagtgccagcacaccgatggtccactgtgcggcaaatgaaaaagaggtgaaaaataacagtgcggtcagcaaacctgtgcgtgcggctatctgcatgtgtccccgggtcagtgcgtcctgtgtccgttttctgagaaaaatctgttgttttagatcaatgtattccccgttatgtggttaaccacaatagggggactctccggcaatttttacaatccccataatgacatatccctttactcaacaacatgtttattcctttttggttgagtttgaatacgacgagcaatgaagttccaaatacaccggagagcagtatggatcttggcaaacgaaaatttctgcaaaacctgggcgtcctgacagcaggtacggccctggttccgatggcggaggcaggtctgcatttttcgccgacccgccgtgaaggcgacccgtcaaagcgctacggtatgctgattgatttacgccgctgtgtcggctgtcagtcctgtaccgtcagctgttcagttgaaaaccagagcccgcaggggcagttccgcaccagtgtcagccagtatcagattcagatccgcaatgaagaggcgaccaccaacgtgcttctgccgcgtctgtgcaaccattgtgataacccgccgtgtgtgccggtatgtccggtgcaggccactttccagcgcgaagacggcattgtggtggtggataacacccgctgtgtcggctgcgcctattgtgtgcaggcctgtccgtacgatgcccgctttattaaccacagcacacagaccgcagataagtgcaccttctgcgcccaccgtctggaagcggggctgttaccggcctgtgtggaatcctgtgtcggcggcgcacgtattatcggtgacctgaaagatccgtccggcaccatcagcaaaatgctcagagagcatgaagctgcgattaaagtgctgaaaccggaaaacggcacactgccgcaggtgttctatctgggactggatgaggctttcgttcatccgctggaaaaccgcggacagcccgcattatggcaggagatccactgatgactgaacaagcgatgttaattcaggaagtgctggcccggccgcaggaaatcacctggctgccgtgggcggtgcaatacttctttatgatagggatcgccgcctgtgccgccctgtatgcctgctggcagcgctggcggggagacaaacgggatgcccgccttgagatgctcgcggtctttatcagcatcaccctcgggatcgccgcgccgatggcactgacagcggatctgcatcagaccgcccgtgtctggcatttctatgcttatccgacgccgtggtcgtggatgccgtggggcgctctgttcctgccggcgtttaccggctgtatcggtctctatttcctggcgctggtggcggacaaaatctggcataagcaatttaaactgacccgctgggtggcactcggcagtgccgcattcgccatcggcctgctgctgtataccggccgtgaggtttcagtggtgcgtgcgcatccgatctggttcagttactggatcccggtgctgctcttcttcagtgcattacaggcactgcctgccctgatgatgctgggtgcccgccgtgagccgcagtatcaggcgcaactggcgcgtctgcaggtggtttcgttactgctgctggcggtgtgtatgggattctggatcgccggtgacaccatttccggtgccgctatccgcgcccagctccgtttcggcacaaccgggtggacactggcgatgggtgaaatcgttctgtggattgcgctgatggtgctggcggtccgtctgctgacccgccgtggctcagtcgcgtatatcaccgttcatgcgctgctgacactgttcctgacctggtcgctgcgctggctgctgctgatgcaggtacagacgctgccgaaatacaatgtcatgcacaatccgtacagcctgccgatgggcacggatggtattcaggccattatcggcacgatcggtttatggatagctctggtgattatattccgtgaaggtatccgctgggttaataacaaagtacagaatcaacagaaagtcgcgcaggacgggggtgtacaacatggctaagtcaacaagacgtcagtggttaaaagcaggtttggcgatcggcggactggcagcgttcggttacagttaccgcgatgtggcgaaacgcgccgtcgacgggctgatgaacggtacttccggtaaagtgactctgcaccgcattaacggtaactcgctgatcccggaagggaatgccctgaaaggctggcaggcggaaaacgcacaggcggtatcgatgacccagtgcttcggctgctggacgcagtgcgggatccgtgcccgtgttgatcgcgaaaccaatcaggtgatccgcattgccggtaacccgtatcatccgctctctcacgaccaccacatcgcctataacacgccgctggcggaagccctgaaaaacatgggcggcgaaagcggcctggaaggacgttccaccgcctgtgcccgtggcgcgacactgatggaagggctgcacagcccgctgcgtatcctggagccgatgaagcgcgccggtaaacgcggcgaaggtaaatggcagcgcatcagctttgaacagctgataaaagaagtgacggaaggcggtgatctgttcggcgaaggtcatgtggacgggctgcgtgctatccgtgacctcgatacgctgattgacccggcacagcctgcactcggcccggtggcaaaccagttactggtgaccaacgccggggatgacgggcgcgatacctttatccgccgttttgcccagaatgccttcggcagcaaaaacttcggcgcacacggcgcttattgcggactggcctatcgcgccggctccggtgcgctgatgaacgacctggacaaaaacgcccacgtcaaaccggactgggattatgtgaagtttgccctgttcctcggcacctctccggcgcagtccggtaacccgttcaaacgccaggggcgtcaactggccaatgcgcggatccgcgacagctttaactatgcggtggtttcaccggcactgccgctgaccactacgcttgccaatgaccacggacactggatcccaatcacaccgggcaccgattccgcgctggtcatgggtatgatccgctggatgattaagaataaccgctataacgcggagtatctcgccgttccgggggaagcctccatgaagcgtgtcggtgagagcagctggacaaacgccactcacctcgtgatcactgatgatgcacatccgctggccggtcagcatctgacagctgaagccctgagcggacaaacatccgaagagcaggtgtatatggtgctgacagagcagggtgagctggttccggcggataattgtgaccgtgcggtacttgaagtcagtcagccggtcacgctggcagacggcaccacggtgaatctgaagagcagtttcctgctgctgaaagaatccgcacagcgttttaccccggcagaatacagtgcccgctgcggtgtgccggaagaaacgattgctgcactggcgaaaacactgacctcatacggccgtcaggcggcggtcatttcgcacggcgggatgatgtccggtaacggattctataacgcctgggcggtgatcatgctcaatgcgctgatcggtaacatgaacctgaaaggcggcgtgtctgtcggcggcggcaagtttaacggcgccaatgacgggccatgctacaaaatggacagcttcccgggcaaagtgaagccgaaaggcatgaacctggcgcgcagtaagtcggtctatgaaaaatctgatgaatacaaaaacaaggtttccgccggtcagaacccgtatccggccaaagcaccgtggtatccgcttgcagccggtcagctgaccgagcagctcggctctgcactggaagggtatccgcacaaactgaaagcctggatcaccaatatgaccaacccgctgtacggcattgcggggatccgtcaggtgatggaagagaagctgaaagacccggcgtatctgccgctgattatcggtatcgatgcctttatgaatgaaaccaccgcgctggcggattacattgtgccggatacccacaactttgaaagctggggattcagtgcgccgtggtccggtgtacagaccaaagccaccaccgcccgctggccggttgttgcgccgcgtgtggcaaaaacggcggatggtcagccggtagcgatggaatccttctgtattgcggtggcgaaagccctgaacctgccgggattcggtgataatgctatcgcggacaatgacggcaacacttatccgctgaacacggcggaggattactatctgcgtgtggcggccaataccgcctttatgggcgaaaaaccggggccggaagccaaagaggcggatatccgtctgtccggggtggatcgcatcatgcctgttatgcagcaggtgctgaaagcagaagaaatcagccgtgttgcttatctcttcagccgcggcggccgttttgcgccgtatgaaaaaggctgggacggggagaaaaccgggccgcagtggaaacagccgctgcagatctggaacgcggaagtggcgcagaaccgccatgccatcaccggcgagcgtttcagcgggtgtccggcctattatccgccgcgtctgtcggacggcagcgatattgaccgcgtctatccggcggaaagctggccgctgaaactgatgtcctttaaatcccatgtgatgagtagttcaaccaccatgattgagcgcctgcaccatgtgaaaccgtcaaacctggtggcgatcaacccggcggacggcgagaagttcggcgtgcagcacggggatctggtgcgtatcaccacgccgggcggcagtgtcgaagcgcagatcagcctgctgaccggtgtgatgccgggtgtggtggcgattgaacacggttacggacatcacgaaatgggcgcacgtcagcactatcttgacggcgaagcgctggcgatggataaacgcatcgcgtccggcattaatatcaacgacctcggcttcgctgacccgacccgccaggtggctaacacctggctggactgggtaaccggagcgtctgtgcggcagggattgccggcgaaagtggaacggatttccgcagcctgataacactgtctgcctcaacccatcatccaacaattataataagtcgtaatgcaatacctctgaccacctccgggtggtctttttttttgccgcagaaaacacaaaggacaccaaatggtgtccctcttgtgcagtctttgcgtgtcagtgtctgatattatctgactgattataatattcgccggactcaattttatcgataccggcctgaagtatgtcaatcaactggcgggcgacatcggtcgtcagccacatagttttatccacttctgcatgttcgggagactgggactgatcctgcagataatgcaggcgcagcatcatggcgtcgtaactgtcgacggtactgatatcccatccgataactggatgagtctggatcacggtttttttatcgttcatggaacctcctaatcatacggcaagatggttaagtatctctgactaagagctaacgtcccgttaacaacgggtgatatcagtataaggtcttttcgcaaagtaaaaaggggggatcagacttttattatgcaaaaaacggcaaaaacgccttctctgaacataatagtagtgcaataagatggtttttaccttattgcactaaaagtctgagtgtttatacttggtttattttgcttaacgacagattttaacatcccagcgggcatcggttccggccaggaaaggcactaaaatatcctctgcgccgttaatgatttccggggtgatgacttcctgacgggttaattcgataaagccgtcattgaccggcagaccataaaacgccgggccgttcagtgaacagaatgcctcaaagtgctccagcgcgttcagctcctcaaataccgtggcataagcggccagtgcggtcggggcattgaacaccccggcacagccgcaggaggactctttgcggtgacgggcatgcggagcgctgtccgtgccgaggaagaaccgtttgcagccgccggccactgcctgacgcagtgcttcctgatgtacattacgtttcagaatcggcaggcagaacagatgcggacgtacaccgccgaccagcatatggttgcggttaaacatcagatgctgcggtgtcagtgtggcggcgacattatcatccccgtccagcacatactgagcagcttctttggtggtgatatgctcgaacaccactttcagtgccgggaaatcacggcgcagcgggatcatcacatcatcaataaaacgggcttcgcggtcgaaaatatcaatatcggcgtgtgtcacttcaccgtgtaccagcagcggcataccattgcgggacatcatctccagcaccggataaatattgcggatatctgacacgccgtgtgcggagttggtggtcgcattcgccggatacagtttacaggcggtaaacacaccttcgcggaaaccgcgttcaatctcagccgggtctgcgttatcggtcagatagcaggtcatcagcggggtgaaactgtgcccctgcggtacggcggccagaatgcgttcgcggtacgcaatggcggcatcggtggtggtgaccggcggaaccaggttcggcatcacaatggcgcgcccgaaaaattcactggtgaaaggcacaacagtaccgagcatcgcaccatcacggaaatggatatgccagtcgtcagggcggcggattttcagggaagtaacaggatgagtcattgaaccggctccgaaataagtaaaggataacctgatggcgggtgccataagccggaaaagaatgatagaacgattcgccggtaaataccatgttaatttgcgcttttgcgttaccggcggagaaacggtagctctgttgcagaaacgggcagggggtttctgaatgtttgtccgggttaccggcatcacgggtcggttgtcgtaatgacctgttgtaaaatccgcactattgctttgcacctatatagcatatgatctatattataaggacataacgtgtggaagatagtcacaacagataattttacagcgtggtttgcaaaaacaggagttaacaatgggaaagtcactcagacaactgctggctgaggaaaagccggaagtcgcggctgctgcacgggttcaggcggatgagatcctgctgaatatccatctggcggagctgcgggagaaagtgaagaaaacacaggtggaaatggcgcaggcactgggaataaaacagccgacagtcgcagggatggaaaaaccggggcgtgatgtcaaattatccacgctgagacgctatgtggatgccatcggcggaaaactgaatattgatgttgaactgccggacggcacgcattatatgttccgggtctgatacgggatactgcggataaaacagagaaataaacaggagaggtaaacgttggctcctccagctggactcgaaccagcgacatacggattaacagtccgccgttctaccgactgaactatggaggaacatcttcaacgcggggtgcatagtagtgcggcggggccggtttgtcaaaatgaaaaatgactttttgaatcgtttgctttgtttgtgatcactttgcaggaaataacagcaaaaagcataatttctgcctgtaaatcagtcagtcatgaaaaataaaaacaggcagacagaaattaccggatggcataaacgaaaaagcccgctcagtgagcgggctcttaaatatggctcctccagctggacttgaaccagcgacatacggattaacagtccgccgttctaccgactgaactatggaggaagcgtgttctctgtgagaacggggtgcatagtaatgtggtcagaacggattgtcaaagcgaaaatcagagattgtgatctgtttgccgtacttatgagcattccggcggaataatcatcaaaatcatggggttaacaggtataaatccggattttcaccctcagggaattcatcagaagccgtgcggaaaaagaagaacagcagaaatgaaaaaagcctgctcagtgagcaggcttttaaatttggctcctccagctggacttgaaccagcgacatacggattaacagtccgccgttctaccgactgaactatggaggaatcgcgttctcgtgagaacggggtgaatcatagctatcctgcggcagcttgtaaagggcaaaatgcaaaaaaatgactgagtggctaaggcttgagcaattgcggataagcagggacaaaaacgaaaaagcccgctcagtgagcgggctcttaaatatggctcctccagctggacttgaaccagcgacatacggattaacagtccgccgttctaccgactgaactatggaggaagcgtgttcccttgggaacgaggcgcatattaacggggtgccccggttgtgtcaacgggaaaaaggcaattttattctgtttgctcagcaagtaacccgggtgagtgaaaaacaggcataaacagtggcttaagctgcacctttcatccagtgagagcgtggtttttccggatgcgcttccgggtacgccatcagatgcagatcataaaatgacacggtaccttttgtttctgtcatatggcggatctcctgtttcagtgaatcactgacctgcgggtggtcaagtaacgccgtcagggtttccgggggcacaacttcactgacaaaccattcgccgttgtagcacacccgcagatccagcacgccgatatccgtaaagcggtaaaccggtctgacctcaaacagcagaaccgcagccattaccaggaacagagcactgaaaccgagcagccagtaaaagccgaagtagggtgcataataaataagaacacccagaacaagataggacaccaccatcgccagacataaataaggataggtgcggataaaatgactgctgaaacggggttttccgtcccgtttctcacgctggttgatattatcaagagcgccggtaataagtgttctgacgacatccatatgaatgacctccgcaggtctgctgactattctgatacattatattaacatgtccggtacacaaccgcgcagaacagttacgggctttgtgagggataactgttatgatgcgaggattattaagaatagtcttatttggcttaagtctggcctgattgtcagttcaatacgctgaaatcgcagacaattaaccaaacaaaagttaataaatatgagctctttcactttttttaaaattcacggcaataaatcagttgctattcatccccactcatgagttaatgcttgcggccctaaaaagagcagctttatgtatgacaactgagtttgagcgtttaagttgagtgttatcccggatagcctttgaccgtttcatatgctgtgtgcctccatttagtttttgcttccggccagtacctgccaaaatggcaatgcatttatttatatataggaaagtcacatgtctgacaaaatgaaaggtcaagttaagtggttcaacgaatctaaaggctttggtttcatcactccagctgatggcagcaaagatgttttcgttcacttctctgccattcagggcgcaggtttcaaaaccctgggcgaaggccaacaagtagaattcaccatcgagaatggtgctaaaggcccggctgcagctaacgtaactccgctgtaagatatagccaaaccgaattccaagcctgccgcgtaagtggcgggctttttttatacctgatttttatgctaatcacactatcgtgacgaccgggagccggatgatgcagattgacgacacagtttatgtcaaaaccgatgcggatgagccgcgtgaaggccggatattgctgatcgaaccgttcagtgaaggtgtgatgtatctggtggcgttaccggaatatccggagggaatttggttttttaatgaaaaagagggcggggatggtgtattcatcacgccgaaaaataatttctgactttacatattttcgcggacatcctatactccgcgcatcttttctgaacagaggacccggatttggacagtcacagttataactcaattaactgatccggcacacctttctcttctgaaactgtctgccggaatgataatggcgggcagcacctttcttgcggtactgcacttttttattgatacagatgatccgccggttcccggtcgtatcactgctacaggtatgcagtatgtttattgtttctcacgcactctttcctcctggttactgagcagaattttcagtcatttttactttttctgctgttaacacctgacgccattgcgtctttcgggtggaggttactatgtttgcaattccttatttactcaatttactggcggcgctggcacttggcgccctgattggtgcggagcgccagtggcgtcagcggatggcaggtctgcgcaccaatgcgctggtggcagtaggtgccgctgtatttatcttaagttcggtgaccacatcaccggacagcccgggacgtatagccgcacaggtggtttccgggatcggttttctcggggccggcgttattatgcgtgaaggcatgaatatccgcgggctgaataccgccgcgacattatggtgctcagccggtataggtgtgctgtgcggactgggggaatttggtccggcagtgacggcagcactggttatcttatgcgccaatattttgctgcgggaagctgcgcagcgcatcaatgcccggccggtcattcacgccacggacctggtgcaggactataaaatccgtgccgtttgtcatgaaaaagatgaaattctggtcagaaccgtgatccttcaggcgctgaatggttcacatgtccggctgcactcactcagtagtgcggatacttccggcggaaaactggaggtttgtgcggaagtgcgtgccacaccggcagagcagaaggagatagaagccattgtttgccgggtcagtctggagagaagtgtcagtgcggtcaactggatgattgcctctgaactgccggtctgatgcctttctgtacgctggtcagcaactatcgatctttttttaataaagccttaaggtttgtgccggtggttattccaccggctttattctgtgtatcaacagaatatttatatttagtgataatttttgatggaagaggcagaggatttttagcttattttaagaataaagaactaaatcttcagctatccgcttgatggaaagtgccggattagtgtcacactacggcagattttttgtggcagtaaagtgaggttacggggtggagagcgtgacgtctgtcataaatatcggcccggatttcagaaacttttcagaaaatcagcaataaaccgtgatgacaatcacaatttaataacattttatcgctaatcaggcgatggtataaaaagcgcaggatcgcaaattttgatctgcttactgattttcagtgctgcgggataaagagcactgttctgcgggactgaatagcgtgaaataattaccctgaatcgtcacatgactgcgatacacttttaatttgtaaaaacaaaagtatatagtaactatatgttactatattgtaggttattacttcagacacgatcctatcttttaatgctacatttaattaacgactttgctaataggaaaatgccgggattgtgatggtatgatgccatttctgtgacagaaggatgtcagtgtgtttttcagaacagtaaccggtttatcaaagaggcggcgagtttataaaagtatcatccgaaggtatatacataaccttatcagctccggaaagacaaataagtgagcatataaaaagagagagccattatttttaaaaagaaataaagacagcctgaattgaaaaccacaacaatgaattaaattcatttaatcttcagttaccttccttccaaataaccccttggctataacataaagttatcttatgatttatcatcatgaatggctattttttgttaaaaataactaaacattgatcagcggggatgttatgtaatgctcacaatttcacattgttattgcagggtcataaaccgggtgaaaatgaacaaaatcgagctttatataaccatttaggtgaaaaataagagttttgtaccgctatttttgctaagtataccttcgatagatagggtaaagcagagtttcccaataaagctcattgatctggatcaatataggcagtcacattatatgattggtgcaatggacttgagtcacacacattttgagtcgtattcgcctgaagattattgacatttgacttatgggagtgataagtacggtgagtatttgggatatggtgagacaaaatataattaatagtaaaattgtactaatgcatggtgggatgtttatctttctctgccaaaaacaaacatcagtggcttgaatagttaattttgtggtgcataataaataacgtctataaatgatataagatgattcagacattaaataagctggtgctgattttaatcgttacctttattgtttacaggtattcctgatatgtatttaatttaagtttacttttgtgtgtttcgcacgcatgccggatatttatatggattggcagtaaacgatggaatgagcttctccggtatttattacattacgtaaaacaggatctccggtatcacacagcgccggagatagtttctgctgtactttgttgctgctgatattcggaaaggaaaaaaaatgagccagacgactgattttctgaagcatatttatgatattaacctctcatacctgctgttagcccaaaaacttattgctcaggaaaaagcttctgccatgttccgcttaggcattaacgatgcaatggcaactacgttagcaaaccttacgctctctcaattggtcaaattagcggaaaccaaccagctaatctgtcagttcagatttgaaagcagcgaaaccattgaaaaacttacacgcgattcccgcgtggatgaattacaacaggttcataccggaattttactgtcaacccgtctgctgcaaacgcacggcgcggctggcactgactcacacgcaagaaaaagataagtatcatggccgaaaaaagtatcatcaaagaggctcaggatatccgtctcgcgatggaattaatctctctgggtgctcgtcttcagatgttggaaagcgaaacgcaaatcagccgcggacgcctgatccgcctctacaaagagctgcgcggatgtccgcccccgaaaggtatgctgccgttttccaccgactggtttatgacgtgggaacaaaatattcacgcctccatgttttataacgcctatgagtttctgatgaacagcggacagtgcaccggtgttgatgtgatagtaaaggcttaccggctgtacctggagcagtgtcctccggcgcccggtgaagagccgctgctggcactgacccgcgcctggaccctggtgcgttttgtggagagcgggatgcttcagcgctcggtctgcagttgctgcagcgggtcatttgttacctacgcgcacatccctgaaaacagttttacctgcagtttgtgccagccgccgtcacgggcaataaaaaaacgtaaactttccgcgcttcccgccgatataacgctatatcgagaggatggcattgccaaagcggtaatgtgactggattgatttggtaaacaggcaaatccgttttgcctgtccttcctgaaaattccctttgactgccatccgatacctaactgagttaaagggaatagtgtgttaatactcatcggatacatcattgttacgggcacggtcatcggcggctatctgatggttggcggccatatgggcgcactttatcaacccgctgaatttgttattattttaggtgccggttttggtgcatttgtcgtcggtaacagcggaaaatccattgttgccctgggtaaagtactgccgcgtctgttccggcgctcctcctacaacaaagcgatgtcaatggatctgatggcgctgttgttccagttgctcaataaatcccgccagcaggggctgcttgccctggaaaaagatatcgaaaatccgcaggaaagcgatattttttcccagtacccgcgcattctcaaagatccggctgcactgatgtttctggtggattatctgcgtctgatgatcaccagtaacctgcaaagccacgaaattgaagccctgatggatgaggaactggaaaccttccgtcaggagagcgaagtgccggcttccggcctgaatatggtcggggattccatgccggcattcggtattgttgccgccgttctcggggtggttaatgcgctgggttctgctgaccgtccggccggtgagctgggggcgctgattgcgcatgcgatggttgggacattcctcggtattctcgtcgcgtatggctttattttaccgctggcgtcactgattcgtctgcgcagtggtgaacagctgaaaatgctggaatgtatcaaagtcactttcctttcatccttacagggttatccgccgcaaatcgcggttgaattcggccgtaaagtcctgttcagcgccgaccgtccttcctttaccgagctggaagacaaagtccgtgaagtaaaagtcagccaccgtaccgaagcacaggacggggagtaaaccgacgatgaaaccgggcaatacgcatgttatccgcgtcaaaaagcggggcggtcacgggcacggcggcggacacggcgggtcatggaagattgcttacgctgactttatgaccgccatgatggcgttcttcctggtgatgtggctgatttctatctccagcccgcaggagctgactcagattgcggaatacttccgcacgccgctgaaaacagcgatcaacccgggaacaaaaaccggggatgccactaacccgattccgggcggcggcaaagacatcatttacaaagacggtgacacactgccggacccggacagcatgcaggaagagcaggggcaggatgaagccggtcgttttgagaaactgaaacaggatctggagcaggcgattctcaaagacccgcgtctgaatgaactgaagccgcatctgctgattgataccacagatgacgggctgcggatccagattgtcgacagtgccaaccgcccgatgtttatggtcggatccactcatgttgagccgtatatgcgggacattctgcgggctatcgcgccgatcctcaatgacgtgccgaaccgcatcagtatttccggtcacacggatgacctgccgtatgccaacggcggtaattacagcaactgggaactgtctgccgaacgcgccaatgcctcgcgccgtgaactggtgcgcggtggtatggccgagaacaaaattctgcgggtggtcgggatggcatcctctatccatctggataaaaacgacggacttgcgccggtgaaccgccgtatcagcatcattgttctgaatgagtcggagatggcaaatattctccatgaatatgatggtgctgttcccattaccgatttacagcagctgaagcagttaccggcgccgcatacagagacaccggctccgccggagatcccgccggaaaaagtgccggaaccggcggcaccggagcagacaccgccgcagaacagcgctgcggcggcagatacaacacaataaacaggatggacaggtactgccggattgccggcagtacctgtcagccgtaacacaagaaaaaaattggataaccgcgatggatataaccgagttttatcaaacgttcttcgatgaagccgacgagctgctccgggatatggaacagcacctgctggagcttgatccccgggatccggacagtgaacagctcaatgctatcttccgcagcgcgcactccattaaaggtggtgcggcaacattcggattcacgctgttgcagaaaaccacacacaccctggaaaacctgcttgataaagcccgccatgatgagctgacgctgacgccggatatcattgatgtcttccttgataccaaagatgtgatgggctcgcagctggatgcctataagagcgacacactgccggatgaagaaagctttaaccgcatctgtgaagtactggggcatgtggagcagagtgtggcggacgccgctgttgtcacggaaaccgccgcgccggaaccggtcagtgaaaccgcagaaattactgccggctcagaagagagcagcacagtaccggaaaccggtttttcacatcatttcacgttcacgctcagtaagttaaaggagagcgaagtcgctctgctggccgatgagctgtcgctgttcggcacggtatacaaaactgaacagggtaccgataccctgaaagtctggctgggcaccaataccgcgattgatgacatcagcggcgtgctctgctttgtggtggatgattctcagattgcgtatgaggaaacaccggcagcggaattaaccgccatgctggccgcagacaataccccggcagaggcggaagaagaaaccgtcagcgcaccggttgctgtaccggcaccggcagcagcatcgtcatctgctccggcggcgcgcaaagcaccggctgcggcggcaaaaaataaaggtgacagcggcagcatccgtgtggcggtggaaaaggtggatcagctgatcaacctggtcggtgagctggtgattatccagtcaatgctgactcagcacagccagcaggtggatcaggccgaatatgcggaactgctcagttcgattgttcagctggaacgcaactcgcgggcgctgcaggaatctgtcatgtctatccgcatgatgccgatggattatgtcttcagccgcttcccgcgcatggtgcgcgatatcgcctcaaaactgaataagaaaattgagctgaaagtggagggcagctccaccgaactcgataagagcctgatcgagcggattatcgatccgctgacccacctggtgcgcaacagcctcgaccacggtattgagaaaccggacgtccgcgcggcaaacggcaaaccggaagccgggactctgaccctggcggcggaacatcagagcggcaatatctgcattgaagtgcgggatgacggtgccggtctgaaccgggagcggatcctggccaaggcccgtcagcagggcatggatgtgcacgacaacatgactaacgatgaaatcgcgatgctgattatggcaccgggtttctccactgccgaagtgatcaccgatgtgtccggccgcggcgtgggtatggatgtggtgaaacggaacattcaggacatgggcggccgtattcagattggtttcaccgaagggcgcggcaccgtgacccgcatcctgctgccgctgactctggctatcctcgacggtatgtccgtcaaagtggccgatgatgtctttattgtgccgctcagcgccattatcagcacactccagccgcgtcaggaagacatttaccgccttgccggtgaggaaaaaatgctgctggtgcgcggcgaatatctgccgctggtggaaatgcatcaggtcttcggtatcgaagaagcggaacgtgatctggcgaaaagtatcgccctgattgttcagaacgccggtaaccgttacgccctgctggttgacagactgatcggacagcagcaggtggtggtgaaaaatgttgaaagtaattaccgcaaaattccggggatctctgccgccactattatgggtgacggttctgtcgcactgattattgatgtggcggaactgcagcggatgaacaacgaaattttgtgcaaaaagaaaatgaacacgtcacacgtcgtgatgcaataaacaaaggtaaataaccatgtcgatgatggatgaagatttaaacaaactcgatgaagagaaaaacggcgaagggtacctgatttttaccctgggcgaagaagagtacggcattgagatcctgaaagtacaggaaatccgtggttatgagcaggtcacccgcattgcgaataccccggattttatcaagggtgtcactaacttacgcggtgtgattatcccgattatcgatctgcgtgtgaagttctcccatcagaacgtcacttacaacgacaacaccgtagtgattgtggtcaatctgaaagatcgtgtggtggggattgtggtggacggcgtgtctgacgtgctggtgctcaaagatgagcagattgccccggcgccggattttgcggtcactttatcaaccaagtatctgaccggcctgggcaccattggtgaccggatgctgatcctggtggatatcgaaaagctgctttccagcgaggaaatggcactcatcgacagcatggctgaatgataattcagccaaatggttttggttaagccatcactaaagttttttgtcgtgtgaccgatatcaaaaatacaataacactatgccagtagaaaattatgtatagcagaattaaaattgtatcagggcttttatccgttattcttatatttgtactgttgcagctggcatccagcgggctgatgttcagcaaactgggtgaaaaccgcgacagtatccactttttggattcactccagagtcagagacaggttctgacccagagctgggttaatctgatccaggcccgcgccaatttaaaccgggcggcaaacggctttttgctcagagagcacacctttaaagacgatgccaccccggatgagctgatcaaacaggccacccgtcagttagcggatgcagacgctgcgtatgcccgctacatgaaaatgatggaaggcaccagttacgacaaggcgaagtttgaaaagctgctctccacgtatgaaacctaccgtaatgcactgacccggctgatgtcctatgtccgggaagatcagctggaacagttctacacctatgccacatccggttatcagatgaagttcgaagagcagtttaattcgtatttcgacagtatttctgcggcgttccggggtgaagtacagaatgcggaagataacttcagtgaatccctgtatatgctgattgccctggctattatccttgcgctgatcagtcttatcagttaccgctatgtacagcgcggcattattcaccctctcaatggcctggtagaccgcatcaaaatctttgctgccggtgacctgaccccgacagttgcggtgaacggtaaaaatgaaatcgctgatctgggccgcggtgtgcagcacatgcagcaggagctgattaatacggtgcgcggtgtgcgcgacggcagcgaaaatatctatcagggtaccagcgaaatcgccgccggtaacaatgatctgtctgcccgtacccaggagcaggttgcctgtctggaacagactgctgccagcatggaagagctgaccgcaacggtgaaacagaacaccgaatacgcccatcaggccagtgaatttgccggtcaggcttctgacattgcccgtgaaggcggcaaagtggtgtccaacgtggtgaataccatgctgaatatcgctgacagttcacagaaaatttccgatatcactgccgttatcgacagcattgcgttccagaccaatattctggccctgaacgcggcagttgaagctgcccgtgccggtgaacacggccgtggtttcgcggtggtggcggatgaagtccgtaacctggcgcagcgcagcgcggatgcggcaaaagagatcaaaatcctcatcgaagactcggtatcccgtaccggaaccggtgcccgtcaggcagaagatgccggcgaaaccatgaccaaaatcgtggaatccgttacccgtgtcaccgacatcatggcgcacattgccacggcatccgatgagcagagcaaaggtatttcacaggtcagtattgcagttgctgaaatggacaaagtgacgcagcagaacgcctcactggttgagcagtctgcggtggcggcaaatgtgctggaagaacaggtggcgaaactgtcacagctgatagccattttccgcttaccggccttgaagcacagggacgataaacacactgaaccggcggcaagaacgatttccaatgtcgtgaaaaccccggatctcagcaaaatatcatcgaagaatcatcaagatgatgacaattgggaaactttttaacgacgcgtctgtgctttgcgctgtcagggaaacctgacggcgcttttgtgcatcacagcgataacaacaaccgaagcaggtgagcccggccggacgcagtggggatagcattatgtttggtaagagaatacggatttctgtcagtttatatctgttgcttattttcttttgcggcatgcagatagtgtccagcggattatcgctggggattgtttcatctgaattatcgtcactggaacgggtcgatctcggctcaaaaaaacgggcattactggtgtcttcttatgaagatctgatgcaggcccgtaacctgcttacccaggttgttgttcatattaaagtcggctctgaagagagcgatatccgccaggtcaaagcagcatttgatttgctgctggataaagcggcggaagattacagcaatttcaaatcccagccggttctcagtgaaaaagaggattttgccggtattgaagaacagtatcagtcttaccttggtgtgattaaagaactgcgcggttacattgataacgccaatatccctgcctatgtggaacacccgacccagatgtatcaggacagaatgggtgcggtggtgaatgattatctggcgctgctggatgaagagagccgcagtgcgattgagtccggtacgttctataaccggatggcgtggattatgttcttcggcgttaccgccaccattctgctgatttccggtctggctcatttctggatgcgttacaaagtgattaatccgctcaccagtatgagcgagcactttatgcaggtcgcacagggcaaactgaaccagaagatagaagtgaccacccgtgatgaaatcggtgtggtattcggtcagcttaagctgatgcaggaatcgctggcagaatctgtctcaaacgttcgcctgaatacagaccagatgtataccggaattcgcgagattgccctgggcaataataatttatcatcacggacagagcagcaggctgcctccctggaggaaaccgctgccagtatggaagagctgaccgcaacggtgaaacagaacgccgataatgcccgtcaggccagtgaacttgcggtgacggcatcgaaaaccgccagccgtggtggtcagatcacggacagcgtgattgaaaccatgacctcgattgccaacagttcgcagaaaatcagcgccattatcagcgtgatcgacggtattgctttccagaccaatatcctggcactgaacgctgccgtggaagccgcccgtgccggtgagcagggacgcggattctccgtggtcgccggtgaggtgcgtgcgctggcacagcgcagtgcggatgccgcgaaagagattaaatccctgattgatgagtcagttgaccgcgtcggtcagggaacgcaactggtggacagcgccggtaaaacaatggaagaactggtcactgcggtgaaccaggtgacggaactgatgagcgaaatcgcgtctgcctccaacgagcagagccgtggtatcgagcaggtggcaaccgccgtcagccagatggatctggtgacccagcagaacgccgcactggttgagcagtcaacaggtgcaacagccgcactggaagatcaggcgaataacctggtcgacacggtcgctttctttgagctgccggataacaggggcactcagtccggctttgccggctgacagtcctgatcaccgcctgacaccggttcgtatcgcagacgccggtgtcagggggtaactgatcggtttgtactgaagactgtcagtgaatcgtttttaccgaaaggacaacaagtacgatgctttttgcgccacagatagaaccactcacagatgatgagtttggtcgggtgtgccggtttattcataaaaagtcaggcatcgtccttagcatgaataaaaagaatatggtctacaaccgcctgttaaagcggctcagagactgcaatatgagcacattcgccgagtacctgcgtttgctggaacgggagccgctgcacccggaatggcaggcatttattaacgcaatgaccaccaatctgaccgcatttttccgggagccgcatcactttcagacactgactgactttatccgtccccgccgtaaccagccgatcactatctggtgcgcggctgcctcgacaggggaagaaccgtattcgatcgccatgacactcagtgatgttctcggtgcgaacgccatgaatgccaaagtgatcgccagtgatatcgataccgaagttctggagaaggcccgtaagggcgtctaccgtatcgaagagctgaaaagcctcaacgcccttcagcgtcagcgccattttatgaagggggtcggggaatatgaaggctatgcccgggtgaaaccggcgctcggccggatgattgatttccgttatctgaatctgacggacaacgactggcagtttcaggggcagttcgatgccatattttgtcgtaatgtcatgatttatttcgataaggatatgcagaaacaactactggaacgttttgttccgctactgaagcctgacgggctgctgtttatcgggcactcggagaacttatcacagttatcttcgcgttatgtcatcagaggacagaccgtgtacagcattcaggcggccgggagaagtgatgaaaaaaataaaagtactttgcgttgatgactcggcgctgatgcgccagttaatgcgtgaaattattaacagccatccggatatgaccgtggtggacgtggcaccggatccgtatgttgcgcgtgatctgattaaacagcatgaaccggatgtggtaacgctggatgtggaaatgccgcggatggacggcatcgattttctggaaaaactgatgcgtctgcacccggtaccggtggtgatggtctccacactgacctccaaaggctcggaagtgacgctgaaagccctggaactcggagcggtggattttgtcaccaaaccgcagatcgggatccgcgaaaccatgatgagttaccgcgaccttatcggtgaaaaaatccgtgccgcagcgatgtcaaaaatcacgcagggtaaccgcttccgccgccaggaaaaagtgacggcagcaccggcggttatcagcaaaccgctgtcatcgtatgcctgccataaccgcctgattgcggtgggcgcatcgaccggcggaacggaagctatccgtcagttcctggagatgctgccgcctgagtgtccgccggtggtgatcacccagcatatgccggccggtttcacccgctcatttgccgagcgtctgaacaagctctgtgcgctgacggtaaaagaggcggaacacggcgatgtgctgcgcaaagggcatgcttatattgccccgggcgatgcgcatatgctgatcgcggataaaggccagggttaccaggtggtgcttcagcagacaccgccggtgaaccgtcaccgtccgtccgtggatgtgctgtttgactcagtggccgaatgtgctgcccgcaaatgcatcgcggtcctgctgaccggtatgggtatggacggtgcgcgcggcatgctgaatctgcggcagaaaggcgcggtcacgtatgcccaggatgagcgcagctgcgtggtcttcggtatgccgcgcgcggcgattgaactgaatgcggtcgatgaaattcaggatctcgtcaaaattgcccccagtgtgctgggcagacttgctgccgtttccgcctgacggaaccggcaattattcattgtattattgcaggagtggttatggccgctaaagatttgaattttctggtagttgatgatttttccaccatgcgccgtatcgtgcgtaacctcttaaaagagttgggctacaacaaaattgaagaggcggaagacggtgtggatgcactggagaaaatccgtgcaggtcagattgatttcgtggtggcggactggaacatgccgaacatggacgggctggagctgctgaaaaccatccgcgcggatgatgcactcaaacatatcccggtcatgatggtgaccgccgaagcgaaaaaagaaaatattattgccgccgctcaggccggtgccagcggttatgttgtcaagccgttcactgccgcgatcctcgaggaaaaactgaataaagtcttcgaaaaaatgggtctgaactgaggggcttcagcagaaggaaagcaggatgacggaaaataaatcaacggacagaaacaaaaacagtgatgatgatttaaaacagatcatcacccgggtcggttttttaacgaggatgttaagagaaagcatgcgtgaactgggattagaaaagggcgtgcagcaggcggtcgcgacaattccggacggaaaagacagactgcgctacatcgctcagatgactgcacaggcggcggaaaaaacactcaacggcatcgacactatcaagccgttgcaggtaaaaatgcacgaggacgcgctggatttgcaggcgcgctggcaatcctgtccgtcagcagaggtcgatccggctctgcaggaatccaccatggcgtttatccgccgggtgattgacggcagtgcggtgaccaaaagtgagttactggaaattatgatggctcaggatttccaggatctgaccggtcaggtcgtgaaaaaaatgatggaagtggtggaagaaacagagaaacagctgctgtttctgctgatggaaaacacccctgcggaaatccgtgcaaaacatccggtcgacagtctgaaaaacggaccgcagattgatccgaaagggaccaatgtgatggcatcacagtcacaggttgatgatctgctcgatgagcttggtttctgatataaaaaaaccgcagcagggatgccgcggttcagaacggtcagtctgtcacaacggaaatcagatacccattgcctgcttaatctgagccattgcgtcgctgcctgctttgcatgctgcgtcctgctgctctttcggcagtgttgcgatttgttttttcgcttcgtcaaactgtttcagcattggttctaactgtgctttggctgcttcgttgtcaccggctttttcagttgctttcttcactaaatcatcgacttcagcaaagtatttgttacaggtttcagttgcacccggaacggatgatgctgatttttcttcgccggaacatgcagtcagagccagagccattaaacccagagagcaggctaaaattgtttttttcatcagtgagtaccttgtgattatcgtggaataaaacagtggcaaattataaagtaccggtaacaactgcctatcggaattgttcctaatttaacactccgtgcgaaatacgggctttcatcaggttcagcggcttaatttgactatattgcgttgctgaccactgcctgcgggtgtcactgagtgattttctgctgataattccgtcactcctgctttaatcagggaattacaccgttaagaccggtcattttccaccattgaatttgccgcattctgtcatgctatagccataagcaaaatcccggcagacggcggaggtgtgagtgtctgatgaaagtgatgtggaaaaaacagaagaacccaccccccataaaaaacagaaagccaaagaagacggacaaattgtccgctccaaagaactcagctcactgatgatgatgctggccggtatcagcctgctgtggttaagcggcggtcatctggcgggacaactgcgtgatatttttcgtcagggatttctctttgataacttttatctgcagaatccggggctgatgctgcgttttctcggaaaagtcattggtgaagcgttatttgcgatgctgccggttgtcggcgggctggcgctggtcggtatttctgcgtcggcactggtcggcggactggcgtttaacaccaaatccatcaaatttgacctgacaaaactgagcccgctgaagggctttaaacgtattttttccatgaatgcgctggccgaattattcaaggcgattcttaaatccctgctgattggcctgggcgcatggatttttttatggcaggcgtggccgtccttactgcatctggcgatggaatccccgtcaacggcaatggccaatgcgatgcagaaagtgatttttgccggttaccttatcatcttcatgctgatcccgatggtggcgtttgatgtgttctggcagttccgttcgcacctgaaaaagctgcggatgagccgccaggaaatcaaggatgaatttaagcagcaggagggtgacccgcagataaaggccaaaattcgtcagcagcagcgcgcgatggcgcgtaaccgcatgatggcggatgtaccgcaggcggatgtgattgtgaccaacccgacgcactacgccgttgccctgaaatatgacgagaaaagaatgaccgcgccgagagtgctggccaaaggtgccggggtgctggcgcagcggatcaaagagataggtgcggagaaccgcattctgctgctggaggcaccgccgctggcgcgggcactttaccgccatgccgaggtggggcagtcaattccggtggcactgtattccgccgtggcggaagtgctggcatgggtgtttcagctgcgccgctggcgtcgtgaaggcggcctgaaaccgaaaaaaccgaagaatttaccggtgccaaaggcacttgattttgttggagaaaatacccgaaatggctaatctggctgcacttttgagattaccgaaaacgatgcagggagcacaatggcagctacttgccgggccggtcctcatcctgatgatcctgtcaatgatggtactgccgctgccggcatttgtgctggatttgctgtttacctttaatatcgcgctgtccattatggtgctgctggtggcgatgttcacccggcgtaccctcgattttgccgcgttcccgactatcctgctgttctccaccttactgcgtctgtcactgaacgtggcatccacccgtatcatcctgatggacggacacaccggtcctgctgctgcgggccgggtggttgaggcgttcgggcacttcctggtcggcggtaactttgccatcgggattgtggtctttatcatcctggtgttaattaactttatggttatcaccaaaggtgcgggacgtatcgccgaagtcggtgcgcgcttcgtgctcgatggtatgccgggcaagcagatggcgattgatgcggatctgaacgccgggatcatcaatgatgaagaagccaaacgccgccgtgcggaagtaacccaggagtccgatttctacggttctatggacggggccagtaagtttgtccgtggtgatgccatcgccgggattatgatcatggtgattaacgtgatcggcggcctgattgtcggcgtggctcagcaccatatgccgctgggcgatgcggccagcacctataccctgctgaccatcggtgacggtctggtggcacagatcccggcactgattatctcaaccgcagccggtgtgattgtgacccgcgtggcgacagatgaagatgccggtgagcagatggtcacccagttgttcaataacccgcgtgtgatgtggctgagtgccggggttctgggtttgctggggcttatccctggcatgccgaactttgtattcctgctgttcacggtggcgctggcatctctcggctggtatctggtgaagaaaagcaaagagccggtcaaagagacggataacaatgtgcaggagcagcagttccgtgaggcgaataaagtcacggaagcgacctgggatgatgtggtggcggaagatttgctggcgatggaagtcggttaccggctgattccgctggtggataatgaccagcagggcgaattgctcgggcggatccgcgggctgcgcaaaaaatttgcccaggaagtcggctatctgccgccggtggtgcatatctgtgacaacctcgaactggcaccgactgcttaccggatcctgatcaaaggggcggaagtcgggcgcggcgaggctcagccgggccgctggctggcgattgacccgggcaatgcggcgggctctctggaaggggatgccacacaggaaccggcatttggtttaccggcagtgtggattgatgatgatctgcgtgagcaggcacagattcagggttacaccgtggtttcagccagtacggcggtggcgacacactttaatcagatcctgctggaatacgccagcgacctgttcggccgtcaggaagcacagatgctgtatgaccgcgtgaagaaagagataccgaagctggcggatgacctgatcccggatactttatcactgaccgttttccaccgcgtgctgcaaaatctgctgactgaaaatgtcatgatccgcgatatgcgcactattattgaaaccctggcagagcaggttggtgagaacggcgagcagaaagataccgatgttctgacgtcgcaggtgcggatagcactgggccgcgctattacccagcagtggttcggggcatcaggggaaattcaggtgattggtctggatgcggggctggagcagatcctgttgcaggccgcgaaaagcggcggcggtctggagccgaacctggcacagaatatcgaaatgcaggcgatgagtgcggtacagcaccaggaagcgatgggtgcaccgacagtattgctggtcaatcattcactgcgtctgatcttatcccgcttcctgcgccgcagtctgccgcagctggcggtgatgtccaaccttgaactgaacgatcgccgtcagatacggatgacttctatgatcggcggttaatcacgggttaaaccattaccatcatactttgcgggaatctgtgaaaacaggttcccgttttttgtatattgagccggtcaaatcatgaccggcattttttgttgtacacagatacagcttactccgctgtatcgttttcatcctcactgaccacaaaccacggtgtgtacagtgtgcgccgctgataaccttttgcggtgatcacctgatgctcacggccgagcgggtcataacagtgcgtgtcggcgtacagatcctgccgcgcactgtcatcactgacatacctccagtcattgacaaagtatggctgatacgtccggacggcatgtcctttgttatcatactcagtgcggcccgacactgcccagcgtgctgtttctttctcacttttccggcttccggctgccagtgaaccgtttttattgcggtggaatgcgtcaccgtcctcaaaacgggctgactgctgtaaaatccgcccgaaaccgtcactgaaggtgacctgctgacggatttgctgtgtgcttttatccgccggttcgtcatcatagcgattagttgtcagggtcagcacatgcggcggcagtttatctgtaccgctgtgcatccagctgtctgcggcatagacaaaacactgcgcaaccggcagttgttttttcatctccgtggcgtcctgcactgaatccggcagtgtcagcggtttctggctgtagccggttttctgaccattttccgtgccgtaaaaacggctgctgatcacccgtcccagcgcatcagtctgtacctggctgatattgtcattggtatcggttatttcgcagacagacagaaaacgccagtcatattttgcctgagtgataagtccggaggcatcggtgtgtttagtgataacacagtgatgtttatcgcgggtcagatgacgttccccgatcagcggattatcgcggacggcaaccggcagcaggaactgttccggtgcaccgtaagtctgatgaccggagcgcgtaatccagaccttttttcctgtttctgaggtaccggcaaacaggtaatccgctttgatatagccggttttcagtaactgctccgtgatatctgtacctgattttatggctgcggtaatcgtctcatccagctctgcagtatccgtataactccggcgcggcggccaggacggaactgttactgacggctgattatctttattcagccagtaagtcctctgttgtccggcaaagtggcgtgcagactggttattgctgagcagggcaggcagtgtttccgtatttaagcccgttgccggaactaatccggatttcagaacaaaaatatcgctgcgatcagcatcaggctgcccggtcagccactgttcctgtttcagattggtcaggtggtgccgtgcatgctgtgataacgatacaatgagttgcaattgctgatcatcataaccggaatcaaacagtgacgcgggcagggtatccggcagcgggttttttgccggtttcggacggcgcggataatgaatcgtcgcttcacgcagcgggtaaccgtactcatccgcactgagtataacggattgtgaacactgcggatcagcagccatgcgttcataatgatattcacggctttctgatacagacggccggactaccggcatatctgcatccggtgtgatcagacggacactcagccgctgttcactgacactgtacggtaaatcctgttgcggactgccgtctttgccgtatacctcacgtaccttggtagcctgaatgcaaattcactatcttataatacttggtatccggttcaaattttcctaatttcggcaaggaataatagtggttttgtgtatcactgccttcccagttcagcttttcgattgaaccggtgccgtcagaaagcgttataattacgccgatatctttagcgtaatccggtgcgttttttccgaacggaatgctcagataaaaaaagtaattctgggtggagtgattgagaaggatataaaagttatagtcgccccggggcagttcattttctccgggagccagtgtcacactctcatactgatataaatcatatccgaaattcagatagtctctggcaaatagccgacgtaacatgtgcggcatggcggtaatatcaattttggcttccaaagtgggtcgcacagttaaaaactgtttattaccttctttgtaactatctattttttcgataaaaatattagtttccagtccataatatcctttctggtcttccggtgttatcgttgataccttatagtcactttcttccgtattaatgcgggtaacattaagggtatccagctgtaattttactgctgtcagcaggtctttgctgttcagcagttgggctgtggtcatatcgggccggatctgtagtccgaatgcatttccgggtaatgtgccctcatcctcttttttgtagcagacaacggttatcgtatctttggctgtgtttgtggcacaatatagcgctttatcttgcttcttctggggctggttattgaattcattggtcacatcataactgaacggtgatgcccaactgccgtcatatttaatatgcgtcagtttcagggtaaaagacgaaatatcctttttaccttcgccatctttccgtacttgttcttcaacccatagcagataaagacgtgaacggaaaatcaccggacgcaccatatcctgatacggattaacagcgcaggtaatttctttccagtcactccaggcattggcagcaaaatgaccgttctgacatttgctgtgatccgccttacgccagtaatattttttcggctcagtctggctggcaccgataaaccaggtattaccttcatcaatatcaaccgcatcatgataaccgctgaccactttcaggttagcgacctgttcaaaggcggtgagatactggcggaagccatcttccagggtgtcgctgttaagctcgctctgagaaagctgctccagcatggtgttcatcatcccggtctgaccaatgcggatagtcgggtcaatatagttttccgggtaatacaccagctgagacacacccgcccaggtgctgtagcgcttattataggtatcccagtctttaaagaactgacgctcaagcacagcgttgtctgcccccggctcatcaccggcaacagtgcggttgatataaagctgaataccggcaatcgcatccgccagcggtgtggtggtgatttcagcactgactttgccgtcaatcagcagtgtacgccagatatcatcacggtttgccagcggtttacccataaccagagcacggtactctccgctgagggcttcactgcggcatggctccgactggttttgcagttgttttgtctgctgttcgttcagaccggcctgtaacaatccggccagtgtggtgagttctgcataagaaggtgacgcattttcagataccgccagcagatgggtgatttctttcggggtgatatgcagattgtctgaaatatcaagataaacagggagtttgcccagctgcgtccatttggtaaccggactgtcggggatgtccgcctgcagacccagaatctggctgatagtgattcccggcacattcagtgcctgcgccagaattttaacggtcagtgtactgctttgcagtgcatccagaacggtaccggcctgcccgccgcagcggttgaccaggttatgaaaatgactgattgcctgtagtccggaaatcgtttttaccggcgcacttgttgacagcacctgaagttctgtatcactgagtgcaaaggtacggataaccagtacgcgttgtgccagtgcctggcagtaagccgcaactgattttttttgcggaggtgtcaggttttccagctgtattttcgaccagagttcagacgctgatatgatcggtgaattttgatctgtatccagccagcgcagtaaatattcactctgtccggcgctttgcaactgcatggatgccgcaatgacaggtgccatggtggaatacaacgtatcggtattggtattatcaatacccccgttacgcagcgcatccagcattatgtccatttctttggtcggcgccgcgggggcatctgtggttaacagcaaaagtaattgatcggcagataagttttgttcgttcagccattgagtcgtttgccacagatagtccatcatctgaaggcggttatcctggtccaggtcagtttttgtaaagggtgacagcaacagtaatgtatttaactgtgaaatactgagagccagagaatcggccagtaagcgaataaggtatagtgtgcttattttactggcattattcgttattactgttgagttgccatggcggtttgtcatcgcagacagtaataacaaatcaatattgttcacagagaaagcacgtttcagtatatctctgcgtgtatctgttgtgtctggttttagtgaaatatcgctataatccaatgaataaacttcaccattgagcggcggattattaaatatccggtcaaactggctaagctggccgtcatagctggcagttctgatagtcgcaccactcaggattaaggcatcatcgctgctgatattgtagcgtttacggtagagcaggaattcacagaagcgatgcagtacggttgtgtccgaatctgtgtctttcagtttcaggcgggttaatgcacgctgggttttcagcggagtcataccggtggctttggccaggcgcagagttttgttgaggatgagcagctaggtagaggaagctaaagcagtgttaacgggaaaaaaatcacaagatgagttagcccaatcatctttattttttatcagaaaacgggtaatactgatatgtattttatctgtaggtgatgagtcctccagtattacagggatactataatgctgacctgcttcagggataaaattttccttaatgtatatttcatccttccaataaccagtaggacttatttggaagttcggccactgaggatagctatttttaacagaaaaattaactaaaaattgtttgtcaccttgcggaactaagtcaatataaaaaaattctttggggtgattatagattttctttgttattcctatgactgtaatctttccgtctgtttcaacaaaatgtaaaggcaatgtgttgatatgggaatcatccggtgtttttgcgccgtatttttccagcatctcctgaatctcatcccgcggcagcccgtaataattcgccagcgcatcaagattcatcaggcggtcagtatcaattcccgggaagtttttcttcagcagcgcttcggttgctgcttcacttaatccgtctgttttttctgtcagaatagcatacagttccggtgagataccggcgtataacgccatctgtgcagcggattgtgcacctttactcagcacatggtccggcagaacaaaattctgttgtgccagggcgttacggatcccctcaaacggcgcgttatacggtgttacaccactgcggcgggaggttgccagggtttcataatatttgtttttgtctgtctgaccggcttgcgccatcagcgccgtttccagttgctcattagccagtgacagggtggaaatctctttatccagattttcctgagataacaccagcttagccaggtcaggacggcgtttgtccagattattgacactgtctttctgatgcaggccacgggcttcgcggtacaactcagtcagatagccggccggggagaacatggaagagaccgcgccgggtgcggcaaactcatcggcacgcggcatgataatgtcgttatagccgtacggcgtcgcgccgtaagtgcgggcagcgcccatctcttttttcagcagcgggttggcgcgggtcagcgcacgggcagtatacagaatgttgttctgctgttctttgattgccgcgcggtgaagtagttgcgcttcttcacgggaaaggcggctgcctgtcaggctgcgaacttcggcaagggacatcggcataaaatctgccagcgtcactgttttaccactacgttgctgattcagcttttcaagaattcgggttatttgatccatcgataatggccttataaatatgcaattcacataaagtgggctgatttgttgagttaatacactgaatatctggttataaagaggcctttatttcaataaagatttctttttcagggtatataaccagaggacatacttattgaccgttgagaatgagtcaaataaatctattgacatggtgtgctgattttgtggtgctttatttatttatttatttatttatttatttgatttttaaagcagaaatgattttattttcaatggggtaataatagatttgaattatgaatttatatttttatataggaatggctgtatatctgatgttattcaggatgccgccgggcggcagtcaataatatgagcgtaaagggggatacaatattaatcagaaaacagaagtgagaacgggaataaagataagggacagagaatattaaaataattaactgccggggaaaggcagttaattatcagacggagatttttttaccgagtgccggtgtgcgggattcctggccgtcagcgccgtaagtcgcctggttattatgttttttcataaaatccagccgctcctgattaaactgcatatgcagtttcagcatctgatgattgcggtaattcatctctttcagcgtcagagtaaggtctttaatcgcattccagacagtgtgcatggtttcattattgtcataaggtgcacacagcccggcttcctgctcaagtgcctggcggcgggtttcattatggccgatcgcggcaaccagaaaccgtttctgttccgtggcttcctgaaacggagactgcggaacacgcgggtagccgagtaacaactcttcatttttcatcacctgatgcagtgactgtaaatgagagagttgttgatccagcagcggcagaagttgatcagtcatttttatcggcgctgtccatggataacatgcactcatgcgcatcgcgcagcagaccgtcagcgattttaccggcatccatccgtaatgtgccgtctttcagggcctgtctgatttctgccacccgtgcagtattaatgtcgtttttacccggcgcaagcagctgcttctgaagttcactcggcgaaaatgcactttcgcggacagtctcttctgcctgaacttttttatcgcgcaccggcgcggtcagctctttcgggtcgcggttagtcacttttgtcagtgctgaaatcgcggatgtttgctcaattgccatatctgttttccttttcccgatctgtatgagatggaggggcgcctcccttgtgctcattgtttatcggcaatcttatctgaaactttataactaaattcatcacgcagcatataactacagtgatactttcacgctgccgttttcaagggcttcaccgctgaccacctgaccattcaccagccggacccggatagtagttccggcggcggcattattaatggcacggccttcatattttaccgagaaattatcaccatccgccatgacaaaaacgctttgtccggcttttattgcccagggtttgcgggtcatggaggcgacataggtctgcccggcatcaatattgcgcagggcaatggcaccgcggagggctattttatcggtaaccgcgcccgcaggcaatttgtgaagtaaaccgcgttttgtgccgatatccacaagctgaacagtttcaccgcgctgaatctgacgggttgccacgtaatactggccggtgacattgactgtcagctgcataaaggtgcgtttttttccgcataacaccggcagtgaaatattgccggtgttacgtccgccggcaggcagttgcagtaccgggtctttacaggcaggccagcggtcgatcggggtttttatttcgacagatacctgcatgggtttcgggtgcagctgccggaagtaatgattgatctcttccggtaacccggcctgtgcggaggcggaaaacaccagtaatccgctgataaacagggtgcggtaacggggtgtcattctcttctccttcacaaacgggattatttctgatggtcgcagtttacgcaatttcctcactgttgaatccggtaaataggttggttatttcgcgtttatcctgccattagattttcacgggacggataatatacctgtcactaaaacaggcgtaacacatcaacagagggcagacatgcttgataagttaaatgccacgtttgcatttcagcagcaggcactttcgctgcgggaaacgcgtcagacaatcttggcatccaatattgccaatgcggatacccccgggtatcaggcacgggatatcgatttcagccaccagctgaaacaggcgatgaataacggcacggtgaagaacggcggtctggcgatggcagtgaccgcgaaaggtcatatcagcggacacggtgccgcaacaccgtcagcggttgatctgaaataccgggtgccgtatcagacatcgatggacggcaataccgtggatatggatgttgaacgcagtcagtttgctgataacaccctgaaatatcaggctgacctgacctttattaacagccgcgtgaaaagcatgctggccgtcttacagcaagggtaattctgatggcactactgagtatttttgatatttccgcctccgcactgaccgcgcagtcccagcgtctgaacgtcagcgccagtaacatggcgaacgccgaaagtgtggccgggccggacggcgaaccgtaccgtgcgaaacaggtggtatttcagaccgcgccgcaggggcgctatgacatcggcggcgtgaaagtcagccagttgattgaagacccggctccgccgcgtctggagtacaaacccggtcatccgctggcggatgaaaaaggttatgtgcggatgccgaacgtggacactgtgggtgaaatgatcaacaccatctccgcctcccgcagttatcaggcaaacctggaagtgatgaacacagccaaagtgctgttgcagaaaaccttaaccctcggacagtaacggagtgagtcatggggattaatgcagcaaccaatgatccggtcaataacgacattgatgcgcagaaaaaaccgcagaaaagtcagagtgatgatatgcgggacacctttctgaaaatgatcgtcacgcagatgcagaaccaggatccgaccaaaccgatggataacacggatctgaccagtcagctggcgcaaatcgccaccctggaaagcatgaacagcctgaatgacagtgtcagcggtatttcaaaacaaattaactccggacagtcattacaggcaacacaactggtcgggaaaaatgtcctgatcccgggcagcgacctggtcctggtaccaaccggtgacggcaccacccgtgtgaaagccgataacccgccgccgggtgatgacacatcaattgcgccgtttgcggatgataacggtggtgatgacagcagcggcagcggatttgaatcctcgccgttcggtttcttcctcgccaaaccggcggacaaaattgagataaccatccgcgacagaaataaaggaattgtcagaaccatcacgattgacggtgaaaccaaaccggatatctacgacaagacctgggacggccgcaatgacaacggtgatctggttgccgataccaaagggaaatacacctttgaggtaaaagccaccatgaagggtgaagagatcccgaaaagcggcgtcgtcagactgaaatacgcgaaagtgaatggcgtgacaccgggagcggatgcaccgctgctggatgtgggcataggcaacagcgtgctgctgtctgaaatctttaaagtgtatccgtcaaattaataagcaaacccaattgtcatggaggtgacatgtctttttcacaagcagtcagcggcctgaacgccgcttcatccggtcttgattcgatcggtaacaacattgccaactccgcaaccaacggctttaaaggggcgcatgcttcttttgctgatatgtttgccggttccggtgtcggtctcggggttaacgttgcggcggtttcccagaacttcaaagacggtgctatcacccgtactgaccgcgctactgatgtggcgatttccggtaacggtttcttccgtctgctggatggtaacggtgatgtggtttacagccgtgacggtgaatttcaccgtgacaagagcggtaacctggtcaacaaccagggcatgatggtcaccggtttcccggcgggtcaggatgctgccggtaacaccactatccagacgggcggcattccgcaggcgctgaatatcccgaccgatatgatggacgccagagcgtccgccaaaggtgaattaaccatgaacctgaactcggatgataaggcaattaccgctgcgtttgatccggacaacccggatacctacaacttcagcaccaccatgaccacctatgacagccagggtaacacccatgaagtcgcggtttactttatcaaaaccgctgacaacaaatggagtgtcaaagccaaagacagcagcgataaaacagcggctgttgaggacctgggtgatatggaatttgacggcaacggcaagctgaaaggtaccgctgattttcagttcacttataaaggcttaaacggtgcggatggcggcacaattgacctgagcttcaataaaacccgtcagcagaaagtcaccgaatcatccgtcagcaaaattgatatcgacggctatcagtccggtgaatacaccagcttcaaaattgagaatgacggcaccatcaccgccagctattccaaccagcagaagcggactgtcggcaaaatcgcactgtctgcgtttgccaacaataacggcctggcatcccagggcggtaacgtctggaaagccaccaatgcctccggtaacccgatggacggcgttccgggtaccggacagttcggtaacctgaccggcggcgcggtggaagcctccaacgtggatatgagccaggaactgatcaacatgattgtgatgcagcgtaactatcagtccaactcgcagaccatcaaaacgcaggatcagatgctgcagacgctggttaacttacgttaagcataaagacagaaggtggccatggatcacgtcatttatacagcaatgggcggcgctaagcatgcgctggaaaatcaggccattgtctcgaacaacattgccaacgtctcgacatccgggtttaaggcacagctgtccgccatgcgggcagtaccggtaaacggcgatacagagcagacccggacactggtggtctcctcgacccccggagcggatatgactcaggggccgctgaactacaccggccgtcagatggatgtggcgcttaatgaaggccatttcctggcggtggcattgccgggcggggaagaagcttatacccgtaacggcagcattcaggtttcggcggatggtcagctgatgctgggtgaacaccttctgcagggtgacggcggtgcgattgatgtgccgccgcacgcggaactgaccatcggcggtgacggtactatcaccgcgctgatcccgactgatccgccgaccatgctcggacagataggccgtctgaaagtggtggaagcgaaaccgcaggatgttctgcgcggtgaggacgggctgtttcatctcactgctgcggcgcgtaatgccaatggcaatgaactgccgctgagtgagcgcggcaaagtatcgtccggtgtgctggaaggcagtaacgtcaacccggcacaggcgatggtggaaatgattgccaatgcgcgtcatttcgagatgcagatgaaagtggttcacagcgcggatgagaatgcccagcgggccaatcagctgcttgcggtgagttaatattcagtaaggaattatcatgatccgttcattatggattgccaaaaccgggcttgaagcccagcagacgaacctggatgttatttccaacaacctggccaacgtcagcaccaacggttttaaacgccagcgtgcggtgtttgaagatctgctttaccagaacatccgccagccgggtgccatgagttccgagcagacctctctgccgaccggtctccagctgggtacaggtgtacgtccggtcgcaaccacccgtattcatgcccagggtgcgctgaacaaaaccggcacatcgactgatatcgccatcagcggacagggttttatccatgtccagatgccggacggttctgatgcctatacccgcgacggttcactgcatcctgatcagaacggtcagctggtgacctcatccggttatcagattgtcccggccattatgatcccggaaggggcgcagaagatggaaatcggccgtgacggtacggtttctgtcaccatgtacggcgaaagccagccgcagcaaatcgggcaaatcaccctgaccaccttcatcaatgatgcaggtctggagagcatcggcgaaaacctgtatatggaaaccgccagctccggcgcaccgacagaaagtgcccctgaaaccaacggtgcaggccgtctgtatcagggcatggtggaaacctctaacgttaacgtggcggaagaactggtcaatatgatccagacgcagcgcgcgtatgaaatcaacagtaaggccgtttccgcctctgaccagatgttacagcgtctgacacaactgtaatccccgtcccggcggtgaggttatcgctgccggggcttttttactgagacacgcacagaacagcaagagtattaagatgactgaaagcggcattgttccacggcagcaggattgcgcaagttctcctgccacttctgtttgcgggcgcggactggtgacagcggcagtgcttgccgtatcactcagcggctgtgcttacatcaaacccaaaccgctggtggatacccataccaccgcgctgccggtcgcaccgactgccccggccgcgaacggtgctatttttcagagtgcgcagcctgcctactatggctaccagccgctgtttgaggacagacgtccgcgtaatgtcggcgatatcctcaccatcaatctgcaggaaaacgtcagcgccagcaaaaattcctccgctaatgccaaccgtgccggaaaaaccggctttcttgcgtccattctgcccggctttatgcagggctggctcggcggcagcaacacggagctggacgtaaaaggtaacagcgattttaccggcaaaggcggcgctaatgcccagaacacctttaagggcactatcacggtcactgtggatcagctgctggcgaacggtaacctgcatgtggtgggtgaaaaacggatcgccattaaccagggtacggaatctatccgtttctccggtgtggtcaacccgcgcaccatcggggcggataacagtgtcagctccactcaggtggcggatgcccgtattgagtatgtcggcgacggctatatcaatgaatcgcagaatatgggctggttacagcgtttcttcctgaatgtgtcaccgtactgagcagaggtaaagtgagaatgaaaaaagtactgaccggcctgctgattgcggttttaggtttggcgggtctccccgcacacagtgaacggattaaggatctgaccaccgtacagggcgtgcgtgagaatgcgctgattggttacgggctgattgtcggcctcgacggtaccggtgaccagaccatgcagacaccgtttaccacgcagagcctgaataacatgctgtcgcagatggggatcactgtaccgccgggcaccaatatgcagctgaaaaacgtggcggcggtgatggtcaccgccaaaatgccgccgtttgcccgctccggccaggcgatcgacgtggtcgtttcctcaatgggtaacgccaaaagcctgcgcggcggcacactgctgatgacgccgcttaaaggcgtggatggtcaggtgtatgcgctggcacagggtaatatcctggtcggcggtgccggtgtcagtgccggcggcagcagtgtcaaagtgaaccagctggccggcggccgtatcagcggcggagcgacgattgagcgtgaactgccgggcggattcggtcagagcggcgtgattaatctccagctgaatgaagacagttttgcactggcgcaggatatcagcgacgcggtgaaccgcatgaacggtttcggtaccgcaacaccgctggattcccgcacggtacagttacgggtaccgcagagcagcagtgaccaggtgcgtttcctggcacgggtgcaggatctgaatatccgtccgccgcagaatgaagccaaagttatcctgaactcccgcaccggctctgtcgtgattaaccggaccgtcacgctcgacagttgcgcggttgcccacggcagcctcgcggtgacggtcgagcgccagacacaggtcagtcagccggacacgccgtttgccggtggtcagaccgtcgtgacccgcaacaccaatgtcgggatccgtgagcaggacggcacactgaaaaaagtgaatgccggggcgaatctcaatcaggttattcaggcgctcaatacattaggggccacaccgaccgacctgatgtcgattctgcaggcgatggaaagtgccggttgtctgcgggcgaagctggagatcatctgatgagcgacatacagttgatgcagagtgcggcctacgatgtgcagtcgctgggcagcctgaaacagcagctgaatgaaaaaccgcaggaggggctgcgtcaggtgacgcagcaactggaagcgacctttgttcagatgatgctcaaaagcatgcgcgccgcactgccgcaggacggattgttctccagcgaccagacccggatgctgaccagcatgtatgaccagcagatagcccagaacctgtcagaaaaggggctgggcttcggcgatatgatgtttaagcagctttctgcggataatgaaccggatttgccgctgcgttcatcaatgatggcgctggatgatgccacggtgattcagtccatgccgcagcaggcaatggctcagctgatgcggaaattcagttctgcgggggatgcactgagttcaccgctgaaaaaagtgcgtgaactggggcttaacagtcagaatttcattgcaaaactgacagagccggcgaaagcagcatcacagaaaagtggtgtgcatcatctgctgatcctggcacaggcggcactggaaagcggctggggaaagcgggaaattctgaccgcagacggcaaaaccagtcacaacctgtttggtatcaaagccggtaagggttgggaaggtccggtcaccaatatcatgaccaccgaggttatcaacggtaagaccattaaaatgcgtgataacttccgtgtttacggttcttatgaagaggcgattgccgattacacccgtctgctgactgaaaatccgcgttatcacggcgtgaaacaggcggccagtccggagcaggcggcacagcgtctgcacaaggccggatatgccaccgacccgggctattccgacaagctgattgtcctcattaatcaaatccgtggcacacccgccgccgcaccggtggcttcccgtgctgtacaggcgtacaccctcgatttgagtgacattttctgacaaattcacggcgtaaaaaaatgcagttaacactaaatttttacgccgtctttccgataacaaggtaagacataattttaaacggatgctatctgcgctgcattttcagtaagtcgccgggaaagcagtcgccagagaaaggaaaagcacatgctgaataatgtaatgaataacgcattaagcggaattaacgcggcccagggcgggctgagtgttatttccaacaacctggccaacgccggggtgggttattatcaccgccagagcgcggtattcggtgaaaacccgggcacaatgacaaccaacggctatttcggcaacggcacctatttcagccatgtccgccgtgagttcgatgaattcgtcaatatgcagtataacaacgcgcgttcccgcagcggcgactacgaagcattcatgaaaaatgcctccggggtggatgacctgttatccaacagcacggatgatctcgccgggatgctgggcagtttcttcacctcgctggacgaagcggcgagtgacgccagtgacaaaacgctggtggatgtcttcctcggcaaagccaaaaccatggtcagccaactgaaggaagctgaccgccgtctgcgtgagatggataacgatgttaaccatcagattgataataaagttaaagatatcaatacctatgcggaaaaaattgccaaactgaatgagcagatcagcaactcccgtgcggttaacggtgcagagccgaatgatttgctggatgtgcgtgaccgcctggtgaatgagcttaattctgttatcggcatcaaagtgatcgagcagaacggcaacttcaacgtctcgtttgccaacggcctgccgctggtgaccggcggacgtgctaaccgtctggaagcggtggcttccggtgcggatgacagccgtctgagcatcggttttgttgattctgccggtaatgtccgtgaaatcaaagatgaccagatccgtggtggtgagctgagcggtgttctgcgttcccgccgtgaaattattgacccggcaagacaaaagctgaaccagatggcgctggtctttgcggaaaaattcaatgaagttcaccgcaaaggctatgatgccaacggcaagactgacaaagatttctttgcggtcggcagcggcagtgtggtcagcaatacccacaacaaaggcaaagccgattttgatatcaaatacaacgatgtctccaaagtcaccggtaataactacgatgtcagttatgacggcaccaactggaatgtgacccgtctgccggaaggtatcgcagtgaccgcgaattttgacggtgcgaccggcaccttaagtttcgaaggcatggacatcaaaatcagtaacaataccgcacaggccggagataaattcctgctcaagccggtggataatgtgatcggtggtctgaacacgctggtgacaaatgcggcagatttcgccgcagcggacagcaccggtggtgccagcaacaatgaaaatatcaaagagctggtaaaactgcaggatcagaaactggtcggcggcacatcaaccctgtccgatttctatgcatcactggtcaatgatgtgggcagcaaagccagccaggcacagattgattccgaagtgcagaacaaactgacggtcagcttctatgagcagcagcaggggatttccggcgttaataccaacgaagaaagtgtccagatgcagaaaatgcagcagttctttaatgccaacgccaaagtgctgtcgaccgttgatgagttattcaacgttctgatgcgtgcattctgattttgagttaagaaggaaattatcatgcgtttcagcaccaatttaatgttcagtcagcgtgtgtcggatatgaacaatgccaccgcccgctggatggaagcaggcagtaaactggcgtccggtcagcgtgtcagcaaaccgtcagatgacccgcaggcatccgcgcaggcggtgcgtgtcactcagtctgagaaccgcaatcagcaatatgcatccactcgcggctatgccaaaaccgggatgacattgcagatgagcattctcacccagatgaatgaagtatccacacagatggattcaacggttatccaggcctccaaccagggtgcgctcagcgataacgaccgtgcatcactggcagaacagctgcaggggctgaaagatcagctggtgtctctgggtaacacgactgacggtaacggccgttatatttttggtggttatgaatcagatacgccaccgtttgaagtggatgcaacgaccggcgatgtgctttacaaaggcggcgataaatccattacccagaacgtgggcagtgatcgtgaaatgatcagctattttgccggttcggaagtgtttgtcaccacgacaaacgcgaaaggtgaaaaagtcgctgatatgtttactgcgatcaacaaaggtctggaagcactgaaaattcctcagcagaatgcctcacaggctgatctggacagagccagagccgggatggatgaagcaaaccgcggtattaaagccgggatggataaaatctccaatattgaagcgaaacaaggcttgcagttacaggaaatcgacagcctggacttcctgtcacagacccgccggatccagaatgaaagccgtctgagcagcctgcttcacacggactggaccagcacggtatcggattatcaaaaagaaatggcgctgttccaggcctcacaggatatttttaaagatctcaacagtatgtcactgttcagtcgttaaattatccggttttagtactgaattcctttggccgtcactgcgacggcctttttttgtgccggatacaagtcagcggacagggactatcaccgaatgttccggaaaagcgccggccggccgcagttcttctgtcagaaaatcaatgaatgcgcggatacgcggagatttgcgcgattctgccggacaggcaatatgataaatatgggatacggtagtccagggctccagtaccggaaccagttgcccgtttgccacggctttgcgggcaataaagtcatgcattattgcgacgccgttaccggataccgccatatagtatgcggccatcacatcctcataaaatgcagcgtcaccacgggtttcgatatgttcaatcttattgtttatcaccagtggccagcgcagtggtctggtctgttcctgcaaatgcatctgcaggcagttgtgatggcggagatcttccggggtattcagtggcggtgcttttttcagataatccggtgaggcataaatccggaacatagcgaaatcaaccggggtggctatccagtcgggcaggtaattcagccagctggtcatgacgatatcgcaatccgtgctttcctggcgcggaatgcggaagcggagatgaaagtcgacctcgatttgcggataacggcggcggaatttcggcatcagcggaaacactttcagataggcgtaatcattgggcaggcaaacacggattttcccggccggaatggttttcatgtccagcagggcattctctgcatcatacatcgcgtccagcgctgtcctgcaatagctgaggtattgttctcccgcttctgtcagccgcacatggcgggtggttctgacaaacagcggactgcccagcttctgttccagcctcgcaatggttttgctgaccgcagccggagaaatattcagtacctgtgctgcctgtgaaaagctttgcagttcggcggcacggcagaatagttccagtgtacccagcatcaaatcatcaaaatgacgcggcattattaacctcaggttggtaatgaagtgatatcagagtagtttatttcacgcaatgaagaaatataataatttacatcaattgcaagtaataaatcataatcgaaggctatttatgaaaccacaacagcggactgccgtcattaccgatgcagaaagttgtctggggaaagcgttagtcagaacactgcttgatgaacactacaatgtgatcggcatattcagcagcgatgaacacatgcagagttttttgcaggaactggataataaaaccgcatttttacccgtgaccggtgaaagtcactgtactgattttgccggacaactgatgcagcagggtattattcgcttcggaaatatcgatattattattcataattccggtgcttttctcagcaaaacttatgaaaaaacgacaccggatgatttcatgcatttaataaacagtaatatttatagtttatttaatctgagtcaattggcgattaaaaacatgttgaaaaatcacggtggtaaaattatcgtggtaacctcctgtattgccctgcaaccgtcgcagaaaataccggctgcactgagtgtcctggcaaaggaaggcgtgcacggactggtcagagcactggcgctggagtatgcaaagaaaaatatccgcgttaatgcggtagcaccggggtatattgagtccccgctgaatacagaactcaatcaggattttattaatttagtctcaccggcggataaagtcggaaccattaatgatattatagaaagcattcgttttctgctgaaatctgactatattaacggcactgtaatgccggtggacggaggttattcagcaggaaattggtaaccgtgttatttctcaagtcgttttccggattatacacagcaatattcatttgtacgccattaccggatccggtaatcactttctcggtgattaccggttttttatttaagggagataagcggatacttatgctgccctgacaccggatatgagtcaggtcaggttacggagaggcaaacagattaaaaatcagtgagagctgctcaaacgcctgatgaatgacccgctcggtaaagcccggcaggacggagatgatcaggcccagcatgctgataccgacggtcagcgtcagcggaaaacccaccacaaacacagaaagctgcggtgtcatccggttcagaatacccaatgcgaggttaagaatcaggaacagggtgataaacggcagcgccagcattaacccgttgagaaaaatatggttagccgactgtaccagcatgcggaacccttcgcggttaagcggggtgacctgcacaggaatgaggtcaaatgagcttatcacaatatggataagccacaggtgtccgtcaaatgcgagaaacagcagcagagtgataaggttcaggatacgtgccagaatcggcatgttcggcccgccgctcgggtcaaagaaggtggcgaaggataagcccatctgaagaccgatcacttccccggcgtgacggacagcggcaaacgccatctgcatggtcagtcccatcgccacacctatcaccacctgctgtaaaatcacccacagaccgggggcggaaaacagcgggatatttaccaccggcagttgcggggagacaatcagaacagtgaaaaaggccagcatcacccgcaccttactgattgattgtttttcattgaaaaacggtgccgtacccagcaatgccagcacccggataaacgggtagaatccctggctcagccacagcgtcagtgtttcactggtgatacttaacatagatcagccgatgataaacggcagattggttaacagtgcacgcatatagtcagtgagcagattgagcatccacggaccggcaatcacaatcacactgataacagacagaattttcggaatgaatgacagggtcatctcattcacctgagtggcggcctgtaacagacttatcagcagaccggctgccagggcggccagcagcagcggtgcggccagcatcagggcgattttcatggcttcggtgcccatcgccattacggattccggtgtcatactctctcctgactcatattatctcctgactaaaaaaagctttgtgataacgaaccgagcagtaactgccagccatccaccagcacaaaaagcatcagcttaaagggcagcgaaaccgtggcgggcggtaccatcatcatcccgagtgccatcagtacactggcaaccacgaggtcaataatcaggaacggaataaacagcgtgaaaccaatctggaaggcggttttcagctcactggtgataaaggccgggatcagaatgcgcatcggcacatctttggcttcctgaatttcacccactttggcgatacgggcaaacagtgccaggtcgttttcgcgtgtctggccgagcataaatgtgcgcagtggtgcagtaccgcgatccagtgccgtttccaggctgattttgtcttcactgaacggacggtaagcatcttcgtagactttatcgaacaccggtgacatcacgaaaaacgtcagaaacagggccagtcccagcagaacctggttcggcggtgcggacggtgtcccgagtgcgttgcgtaataaacccagcacaataatgatgcgggtaaaactggtggtcatcagcagcagagcagggataaagcccagcagtgtcagaaacagcagggtctgaaccggcagagaccagctctggccgccgtccggcagcacatgactgacgacgcccggcagtgaagcctgcgcctgcggaaccagcagaaacagagcgagtgcgggaatggcgcgtttgagcaatgacatcatgaaaaatctcagcgtggttcgtcagccggtaccgcatctttatttgcggtacgtttggttttcagcagtgcctgaaaggcggaaggggcatcagttaccgccgccgggtcagccggacagcggtgcagcagattaaccgactgtgcggtcacacccagaaccagccattcaccctgaatctccgccaccaccagccgttctttgtttcccagagaacaggtgcttctgatactcagcagcgggtttttgccggccagttttgcggtaaagccgaatttgcggacaaaccaggtcagtcccaggatcagcagaataatgccgctgagtgcgccggacatctgaatcaggctgtccgtgctgttaatcgcctgagaacccactgcgggcggcggcagggcgacggaagaaaaaacggcattatctgccgttttctctgcggccggtaaaacaggggtgccggatgcggtcggtgtcatatcagcggctcaggcggcgcatacgttcagacggggtgataatatccgtgatgcggataccgtaattgtcagagaccaccaccacttcaccctgggcaatcagatagccattgatcaggatatccagcggttcaccggccagcccgtccagtgccaccaccgagccctgggataaactcagcagcttcttgatggtcatttttgtccggcccagttccacagagagacggacagggatatccataatcagattgatatcagacagctgattcagcggattctggctgtcgagattatcaaacgcctggttgttcccggtttctgcttttttttgttgttccattgcctctgcccacagagactcgccatcgtgttccgggttcatatcaggagtgttgttcgcctcactcattggttttttcctcgtccagagtgtttaatacaggattaatcaaatgttccacacgcaatgcatactggccgtcccgggtgccgtactgactggtcagtaccggtacgccgtccacactgacaatcaggcgatccggtttctccaccgggatcacatcccctttctgcagttgcagtaattttgaaatccgcagcgggatttcagcaaaattcgcgaccagttccagctcggaatgcttcacctgtgtcaccaggctggatacccaggcttcattttcctggtgaccgtgctccataggcgggttaatcagccgctcgcggataggttcaatcatggcaatcggaatacagatgctcagctcacccacggtattaccgatctccaccaggaaggaggtggtgaccacgatatcgttgggggaggtggtgatattggtgaatttcacctgcatttctgagcgcacatattccacatccacttcagcaatcggcttccacgcatcgcggtaagcgttcagtgccagtttcagcatacggtggataatgcgctgttcggtgttggtgaattcccggccttcggaacggaccggaaaacggccgtcaccgccgaacaggttatcgacagcgatatagaccagcgccggttcaaaggtgaacagtgcggttccgcgcagcggcggcatatgcacaaggttcaggttggtcggcaccggcaggttacgggcaaattcatgataaggttcaattttgataccaccgacagtgatatcaggactgcggcgcagcatgttgaacaatcccatccggaactgacgggcaaaacgctcgttaataatttccagggactgcatacgctcgcggataacgcggcgctgggtattcgggtcataaggacggactttgtccttacctttattgagtgctgtgtcggcaggctgcggctctgacggcgagtcaccattgagcagcgcgtctatctctgcctgagataaaatattatcgctcatcagttttaccggagaataaaggtggtgaataacacatccgaaatttcctgatccggctgtccctgtaccacggtcggggctaaggtggttttaactgccttcatcagctgaagtttgccgtcatgggttccgagtatctgcggggactgctgtgagagcagaagtaacaggcggctgcggacttccggcagatactcatggagctgtttgcgggaacgctcgttggccagacgcagtgtcatatcaatatacagcacacgatcacggccgttattcataccgggaagattcacggtaaacggttcaatgcccataaagataggctcaggcatattggcccgtttctcgtctgcggtaccggcggtggtactctcctggtgagaagaccaccagctgtaacccccgaaacctgctcctgcgagggcaatcagggcgaaaataaccagtaacccggtattggaaccttttgaggcattgcgtgaagacgacatgttaactgaattcctatttcttgatagcaaaacccggcaggggtttcatactctgtaagcccacccattatggcgtgcttctgaaggactaaaggggggaaaaacgaaacaaaaaggcggtaactcggggctttagtccccggtaccgccgttatgtacaggaatcaggcgaaggtatcgatcccgccgcgggcgcgggcgtcatgaagtgctgacgggcggacaagggtatctgtgctgacattcacgccgctgatgcttccggcagacgtaataccatcagcactgccgccgctgtgacgatcatcaccggaaccctgctgattaccgtgatactcctgtccgacggagctttgcgccaggtggatcccgctctcctgaagggcgttgcgcagcaccggcatcatagattccatcgcggcacggacgtggctgtgcggggagacaaagtgcatcaccgcctgattatcctcaattttaagatggatattcagggagcccagctcttccggatgcagacgcagctgtgcctgctgtaatccctgacgggagaaatagatcatattctggctgacctgctgctgccacagttcactgccgagctgcgcggtcagctgcatggacggctgagccaccggggcattggtctgcgcagcggtactctgagccgccgccggcatcagtaccgggctctggacggcagtatggctgcccggtgcggtgacagtctgaaaggcactgctttctgttttgatactgaacgcgcttttgctgttatccgcaccggtggtatcagtggcggacgtcagcgataacggcacggaagtgtcagcggatttcttattcagcggtaaaaaatcctccggcagtgctttcgggtccggtttctgtgcatcggtcagtgaaaaacgcggctgatccacacgcggtttggatttgtcatccgtaaacagggtgcgtgcgtcgttattttcatccgtgatcagcggtttattaccggtttcagccagtatgtcttccggcagctctgtggttttggtgacgttttttccgctgtcatcaatctgcagctttgtgtccgcggccggtttctctgccgcgcggctgtcccgtccgctcaggcgctctttcagtgccgctagcagggcattgtccgtttcaccttctgtttgcggtaatgcaggtgcatcatccccgctggtcagcaattttgcatccagctcaggtgcggcagcatccccggcaaggcggcgggagaaattcagttgtgccatggtgtcggcaccggtctgtttttcctgtgcggagaccgctttaccctctgcggcctgtttatgcgcggcagtgtcattacgggtctgttttaccgcatgtacagcctgtgccggtttttccgggcgcggctgctgtgcatccattacggcctgaaacggcagggcggttgcctgtgcatcttccgcacgcggtgattcctgtttattcaatgcgttgtcagcagaactgaccactttggtaccggcattgacatccattaacgggttctccataaagtcgcacgctgggcaaattcatccatctgcttttgctccagccggttttgtcgttgattttttgcatgatccgcacggcggatcagagtatcgaaggcattgacgcgctgttgtttttcctgccagtggcggttggcatcactgacgcgctgctcccacaggttcaactgaccctgctgctgttcaatggtcagttcgagagtgaccagaaactgctgatagttctgccatttatcggcagccatcccggtatgcagtgtctgattcagcttctgccggtaatcagcctgataattctccagcatggtcagttgctgactcatctgtgtgtgggtctgacgaacctgcgccagtactttagccgcctcttcggcggcctcttcagctaaatttaacaacgtggtgagtgcatgcgtgtttgacattgacgacctcgttatgcgtccggtatcacctgactgagctgctcacaggcggccgggtagtcacagcgctcatcgatatcctgctgcagaaacttcgccatatacgggaacagctgaatggcctcatccagcatcgggtcactgcctgccgcgtaggcaccgacattaatcagatcgcggttgcgctggtaagcggaggtcagctgtttgaaacgctgaattttccggtaatggcttttctcaatcagctcggtcatggcacggctgatggaggcttcgatatcgatagcagggtagtgtccggattccgccagggaacgcgaaagcacgatatggccgtcaagaatggcccgtgcggagtcagcgatcggatcctgctggtcatccccttcggtcagtacagtgtaaaacgcggtgacagaaccgccgtttttaccgttgcctgcccgttcgaccagtgccggtaattttgcgaacaccgacggaggatagccttttgtcgccggcggttctccgatggcgagcgcaatttcacgctgtgccatactgtaacgggtcagtgaatccataattaacagcacattgcgacccaggtcacggtaatattccgcgatccgcgtggcataagaggcaccctgcatccgcagcagcggggaaacgtccgccggtgccgcgacaaccaccgcacgctgaagtccttccgcgccgaggatgttctcgataaaatcttttacttcgcggccgcgctcaccaatcagcccgaccacaataatgtccgcctgtgtgaaacgcgccatcatgccgagcagcacacttttcccgacaccggaaccggcaaacagccccatacgctgaccacgtccgacggtcagaagggcgttgatagcgcggacaccgacatccagcacactgttaatcggcgaccgttccagcgggttgattggcggcgtaatcagcggggcgcggattttggcttccagcggccctttgccgtccagcgggttaccggaggcatcaaggatacggccgagcagttcatcacccagcggcaactggcggctggtctgcccgccgcttccggtggattgcgcatagacacgggcacccggcgcgataccttccagctctgccagcggcatcagcagcatacgcggcccgttaaaaccgaccacttcacagataacttcttcggtgttcccgttgatcacgcgctcgatgaaacaggtggcgccgagcggcattttgataccctcggcttccatcaccagcccggtgattttggtcagacgcccgtaatggcgggtcatcgccacgccggacatccgggattcaaaaccttccagtgcgcctatccagcggccaatccgcgcggtcataacaaggtctccggcgcgtataaccggcacagctcctgccagcgggtggcgacactcatatcgatttcgccgtcatccgccaccactcggcatccgcctgcatgcagctgcggatccggcaccagacgccagccgttcagactgagctgggtaccgatatgctgctcgatcatctcagcatgtgccgggttgacccgcagttccggctgaccggcaaacagcggtttctgctgaagcagacggctgatctcttcgagcagtgcggtaccgtcacagaccgcaggctgaccgagcacctggcgggcggcggtcagggcaatctgcagcagtttggtggttaccacgctgtcaaaactgtcgagtgagtaactgaactcagacagtaatttctgccacgcttccgtgaccggttgctgttctgccagtacctgctgacggccctgttcagcgccgtcctgcagaccctgagtaaatccggcatcataaccggctttctgtccctgctcatggccggactgaaaaccgctgcgctgcgcttcttctttcagattatccagcagattgatctgctcgagcacctctttcggctccaggcagggtactttgggtttttccggttccggctcatcggacagggcagggagcacagaggaattcagatcccactgattcagctcccgcggctgccagcgcttccacggcaggccggtgttttccttatcagacatagacatcgtcaccaccaccaatcacaatttcgccggtttccatcagacggcggacaatcagcagaatagatttctgttcattctcaacctgcgacatacgcaccggtgaacgggactccagatcatcacggacaatctcagccgcacgggtggacatattgcgcaggaagtgttcgcgcagctcttcgttgcagcctttcagtgcaataaccagcgagtcgttggagacatcctgaaggatgcgctggatactgcggttgtccacttcgataaggttctcgaacaggaacatttcgtcgataatccgctgtgccagttcgccgtcgtaatcgcgcattgccccgataacaccttcttcctgctgacttttcatcaggttgatgatctcggctgcggttctcacgccacccattttgctgcgcttgaggttctggccgtccagcagattgttgaggacttcggtcaattccgccagtgccgccggctgcacaccaccaaaggtggcgatacgcagcatgatgtcgttgcgctggcgttcgtcgaacagttcgagcacatcggcggccaggttgcgttttaaatgcaccaggatggtggcgataatctgcggatgttcgtcgcggataatatcggccacagtctgcggctccatatagttgaggctttcgatcccggacgcactttcgtgcttctcgaggatatcttccagcaggctggcggcgcggtcttcacccagcgccttaaccagcacggaacgcagataatcattggtattgatgttcagcgccgcatactgaatcgccgcttcctcaaactccgtcaggacttccgccagctcggcattggagacctgacgcatgttggagaccgccatactcagctgctggacttctttattgttcaggtgtttaaagacctcggcggcctggtcctcaccgagcgtcatcagcatgacggcgctcttttctgttccgcttaaattcattgtgcttttcctaaccactgactgataaccattgccacaacctgaggatctttatccgccatctcacggatacgctgactctgaatttcggcgctgacacgctgacgggtcaggcggcggcgggttttctcgtccatatcgtcactgataacatcatcagccacgagcggggtcttcatctgagtcgccttaaacatacgggcttctgcttccgcctgctgtgctttgcggtaacgctgccactgcggtctgatacctttgcgccacagcagccagcccaccagtaacagcagcaggatcttgccgtactccagtgcctgcgcaatgatgaccgggcttgtgaagagcgacggctcttcagttagctgaccttcatcggtaaagcgggagttggttatgctcaggctgtcaccgcggctgacggaataccccatcgcttcgcgggtcagcgattcaatctctttaatcatttccggcggcagcggctgcatttcttcggtgccgtcttctttcttctgcggcagccagttaataattaccgcgacagagagacggtcaaccacgccaatctggcgctgggtatgactgattttgcgatccacttcgtagtttgtggtctcatcactctgcgaattaatgttgctgttacttttattatcggcaggagatgcatttttgttatcttttgtatccgcttttgctgtttcaactggagctgcaggagcactgaccggctgattggataatgcccccggcacgccgcccgggccgccgttgctgttctgctgactctggctgctctgacgcgagcggacagcggcggaatccggctgctggtttggtttgtattcttcggcggtctgttcgactttggaataatccacctgagcggttacctgcgcctgtacgttggcacggccgaccagcggggcaagcaggtcttcaatacgttgtttgagacgtgcttcagtttcctgggtcagacgcatctgcgacgtgctgacagactgctggctgttatcattgtttgtcagcagacgtccggtctggtcaacaataataacgttggaggaggttaatcctgacacactgccggagaccatatgcacaatcgcactgatctgaccttcatccagtgcgcggcccggcagcaatccgacggtgacggaggctgtcggtgatttctgctcgcggacaaacagggtcggtttcgggatcgccagatgcacccgcgcggtctgtaccgggctgagtgattcgatagtgcgtgacagttccccttcgagggcgcgctgatagttcacctgctcactgaactgactgataccgaactgctctttatccagcagttcaaaaccggtattaccgcctttcggcagaccggcctgagccagtttcagacgcagctcatgcactttatcagcaggtaccagaatggcactgccgttatccgcaagctggtaaggcatattcatctgtgtcagctggctgacaatatcgccgccgtctttggcactcaggttactgagcagaacgcggtaatccgggctgcgcatccagaggaacagcgcaacaataacggcaattgcagccgcgccggcgaccatcagcggaaccttcggatcagccttaatacggtcaataatcagggcgaatccctttttggtatctccggtgtcttgtggtgcggcactcataaacattccctgccttgcagatttgacgggtgaaaatagttttggcgaaacaacgtaatttccctctttgtaacgtcacttttttacgctgctattattccctgcaaataacaaatctaatgacagaatcagcctgtgattttggtgttatttacgggcttcaagttaaaaagggtgtgttagggtatgcaggcaataggatgtgaccggtgtctttttcagcagaaaatggcttccgcagtgcacatttatccctgttaacggaagaaaaaacatgacaattcaggcaattgagggagtcgtctcccagctgaatgtaacagcagcacaggcagcaagccagacgaaaccggtcgttgatgcaccggggtttggtgatcacctgatctcagcagtgaatgagatcaataccacccgcgttaattcagcaaaaaaggtggaagatttcacactcggcaaagccgatatttcccttaatgatgttatggtggacatgcagaaagcgagcctgagcctgcaaatgggtattcaggtacgtaataaactggtggctgcttatcaggaaattatgtcaatgccggtgtaaatattattatatgaatgcccgaagctgcgggctttcatatttaagtattctgccaatacggggttatttattaaaaaaattccggttatatgtttttcaattaccccgtttttatctgcattgtcacaaaaacttcccgaatcgctttaatctcactgcatgtgtgtttaaataaatgaatcataaatacatattggtgaaaaaatgaaaaaaattcttcctgtactgatcgctgttttatttctggcagggtgtaaagtggatgttgaaaccacggtaaatacggatgacctggtctctcatgaacacaaactggtcgccggtaatatcaatgtggaagtaccggcctgtaatgatttcgaagattcacggaaagaatcaaaaagtcttatcagaattaaagagcagatgccggctgtcttctccggtgcggaatacaaggaatgttataaagagaaatttaattcctatgccagttttatcgttcctgtcggggtcgggtttatcgctgatgatatgaaggcggtaaatgccgggatttatatcttatcaaatgacgagctctatgccggtgtgatgatcacgccggaaacgattaaacgtttgcagtcggccaaaaagtctgctccgggtgatctgaaactgcaaatgacgctggtgctggaaaaaggtaaattaccgatcccgaatattgcggcgatgagtgtgttcatgaccggtacggaagcgaaaaataaaccgctgattgcgagccgtgtgggtatcgtcgggaaagaagtacgctttaagttatctgacgtgtctaatgcgttacttgagagcggcaatattgcaccggtattatacaaagcagagatgctggaaaagttagtggcgaatctgaagaaaaatgactagctgctgttgtcgtaaaaataataagccccggaggggcttattattttacagcggtgccgaggatacattatctccggatagaacatcaacgggtttgattattatcataaactgattttttccgcagccagactataaaatgcaataaccccattgcaccatgaccaataatatacgcttcaatcagtcccgtcagcgttttgtgcaggttacgtatttcaccggcataagctgaccccgccgcccataatataaaccaggctgtaccggatagtacgaccagtaccagtgcaccgagacccagcccctgaacgctggttgccagacctccgggagcggattccggtaatttcccgtgcagcagggcgcggcagtctgccgctatctgcgaaaaacagccgaaagcccacggataatagtgctttattccccgctgatgaaagcagagagcaataagcagggtaccggaaacccagaatgaaagaccggtaataatatgcagccaggtaaaaaataagcgatagccgcttgcgggaataacgccggtgacggaaacagacatccagttgctgatcaaaatctgaagaataacggatataatgataatgaaatgcaatatcaatactgccggtgactgataaatacgcataaactgccgcagagatgagaatattatcattggtataactccgcctgtaataaagattaaataatgtctgcgtaattatactgataatagcaccgttccgcggaatagcgatttaaatatcaccgggcaacagcggaaaaattaaccgggaaacgggattacagatatatcctatattggttattgatggcgggtgcataatcaaagcgcaataatattaacggttgcattgctcgttttcaggagcattcgatgcgtaaaattctgtctgtgtctgctgttgcgttagtttctgcattactggcaagccctgcatttgcggccaaaacggatacctataactgtgacgggcaaaaaattaaagttgctttcccggatgccaaaactgcagtgatggtatacagcgatgaaattattgttctgaaagaagctgttgctgccagcggtgcccgttatgtcggcgaaaatttccagctttggtcaaacggaaaaaatgaactgaatctggccagcatctcagaggatgatgcggtgaaaggcaaagttgccgaagataaaggccgtacctgtaaattagtgaaataacaaagataatttttgttgtaccggataaataaagagagcgggttttcccgctctttttgatctgtttatttatggtttttgcggtaatacgtccattcctcaacccgctcaccacccggtaaattacagtaaccggtccagcctgatgccgctttaacgatttctgttttaccgccggattgttcacaataaacggatgccgggtttgccataccaacgtttgtacctttcgccggtacaggatccttactcagtacggaaattaactgataacggatattgggtgcatccgcaggcggattcggaacattcgttgttttaacggacacccggtactggtatcccggctcataagtaaacccgtcgatgctctgatagaaaaattcccactctgcatcaggggattcttttattttcatgcatttcatcggcgcaacacccacgcaatcggcgagttcagagtcaatatataatgtcctggtattctctgctgcctggtctgtccgtgcattctgactgcatcctgccattaataagaagagcggagcaataacataggctgatttcatcagttgtccttaatgagtgtgttaaagtagtgtgtttttactctgtttttgacagcacaaaaatactattagttccgtatcggcgattttttatctgtataaagagtacaaatgaagagatataaaacagtagtgacaagcgtgataatgctggccagtttttatttccgtgtgtggttgtatacagcaaccgggattacactggtgcaacggataaataataacctgcgggaaccgccggtttctgctgaattttgggattcagtatacctggccggtaaattcctggtggtcattctgctgctggtattgtcgggtgatctgatccgtgtttaccgtaatatccggcggcacccggtaataactgtaccacggactcgtttttatctgacggttaccgcactggcaggtggtgtggctattttcctgctgaccgtcagttattggtatccgttctccgtatagtcacagaatattacagggtataacctgtaaccggacttcagatccggcatctttgtataaattcagccggtttcaatcagggaattgtgaagtaaagaaagaggatctacactatccgctgtacgtatttctcctgacgatgctatttacaggtgaggttatatgacagcaattgatattttctgggtcggtatcggcggcggcagcggttcattactgcgctggtgggtcggtaaactgacaggcgaacgttatcacggccattttccgctgggcacctttattattaatatctcgggtgcgtttattatcggttttttaagcacgttattcgtgattgactggcatgaccgcttcggttcattcctgcatgcggctgttctgaccggtattctcggcggttacaccactttcagcagtatgcagctggatgcggcaaaactggtgaattcaaaacagcggatgctggctttcgggtatttgcttatctctgttgtggcgggtctggctgctgccgcactgggtgtctggctggcggcatgaggataacaatatgaatatggtgattcttatttttattggcggggcattcggcgcaatctgtcgtgaattactgatgcttggtgtgccgtctctgcatgacggatttccgcttgatattctggcggctaatattattgcctcattcctgctgggaataacggcggcattattacagcgcaaccggattaatcagtatgtcaatgcgctggtggccaccggtattatgggcggattgtccacattcagcagctttgtgtacggaacatttgaaataatgtcatccccggcgttactgggtaccggaataacttatttgctggtcagtgtgatcggcggatttgcagctgtcatggcggggttatatctgggaaattgtgtgaaacccggtgtaaaaaataccgctgaatagcaaaacgttccggccgggcagggaacgactgtccggccggaacagatcaggccattttttcattattttaagacaccgcgctgatcagaaaaacttattctactggtttaacatgaatcgaataatccgggtcagtgaattgcccgtaacttttattaatcacccgttgttggtcaagctgttttatttctttactcagaaagttgaggtgatcctgcaaataaatttttgttacccgttcattttcaatgatagcctgcagtatttccaccagttcgccggtaaccggctgttctttttccagttcatgagataactgtgtcaggtgttcaactgcacaaacataatcagtttcacgggcaatcaaatcatcccattcactgtttctggccagggtaacgagttcttcactcagtgtcagtacatgttgatatatatcgtgtaaattgatggtcgtttgaatactcacctgattatctttcatccacatttgccccgatttgttgccatgttgccgcgagatcggagagcagttgatagacctcttttacgtaggtcacgttattttcgatatttgcgttgagtaaccgcataatcatatagtcatacagagaggccagattatgtgccaactcaccgccggcatcataatccagagcctgtttcaggccattatcaataatattaatcgctttcgacagttccttacctttggcggcaatatcattttgctccataaagatttcgctgcggcgaagggcgctgagcgccccgttaaacaaaatccggatcaactgataaggcgaggcattggtaatttcactttcaagattaacttgctgataagcctgatttgccttgcgctgatacattatttttaacctaacattctgccgagtgcttgtgtggtgccactcagggagttcatcattttgtccagattctggaactgacggcgatacagatccatggtgttttcgatctgtttattggtttgttcgatacgtttatcgataccttttttctttttctccagaccgtcggtggcgttatgaatcgtaccttcacggctgtctaatgtctttttcagataattaaagttttcagtggcaaaaccggtctcttttccgtcccccgcaaagaactctttaacactggaaccattttcttttaatgctttatccagaactttgtcatcaatctccagggtaccgtctaacttttgcttgataccgagtttgctcatggtgttgagtgtaccgtcaccattcggtgttctgatttgcccgcggatagtattctggataccgcgtaccgtggaatcaccaatcagcggaccattacttttatccgccgcctcacctttttctgtcttggtatatttggtcagatctttacagagtttctgatactcgttataagcatccacccactctttaattttctttttggccggttcaatatcagaagaaacaaccagcggttcagtaattggttttccggcactgtctttttcagtggtttttttcagtgtcagtgtcagaccaaaaaaagcatctttgacttcgttagtctgtgattcctgttcgataccatttacagtgaacagtgcgttttccggtgcggtcgtctgcttcatgccgccgttactgataaatttaacggtaccgtcggtttgtttttctgattttccgccgatggctttatccagatcatcatcgccggtaacagaaatactgatagcagaattggtcccctgggttttactgattaacaccaggtggtattcaccctgtttatcttttaccacactagcagagacgcctttatccgctttatttatggcatcagcgacttcaatcggcgatgttttatcgctgctcagttttatatcaaaattctttttcgcatcactgccgtcaccgattttaatggaaacagttcgttcagcgttgctgttacccattgatgtcttaccgtcagcaacaccttttccggataaggtctggtttttagccagtcgctcgatgctgacatcatactgacccggctgtgctttacctgtggtggacacaccaaagtatttattttcttcactgactttggtggtactgatatcaccgtattttttcagtgcttcagaggcggattttaatttttccagtgaagactgtaactttccgaaagcactaatctgtgcttcacacgctgttttttgggcagttaacggctccagacggcgcatttctgctttttccagcatgtccatttgctgattaaggtccatatttgcgccgacgcctaacgatgctatgcctgccatgtacttctcctgaatttgattggttttacatagttatcggttggcagcggaagaattttagcgttaacggcaaaaaatgatgggcagagttgcgcagggaaagcagggttattgtcaccattaagataaagaaacaaaaatgagcgtcgggggcagcaatttgattacaaatctcacaaaatgcgttatccggataaatgtgcctgatattgataaaatgacgactttttgtctgtaaataaagtgaattatcgcccgttaacagtattactccgcagcgacggcaaaaataactcacattatttcatacaaaaaaaggaaatatcgttatggcacaagttattaataccaatgttctgtcactggttacccagaataatttaaatcgttctcagggcgtgttaggaactgccattgaacgtctttcttccggcgcccgtattaacagtgcaaaggatgatgctgcaggtcaggcgattgccaaccgctttaccgccaatgtgaaaggtctgacccaggcatcccgtaatgcaagtgacggtatttcactggcgcaggtaacggaaggtgctatcaatgaaatcaacgataacatccagcgtattcgtgagctgggtgtgcaggccaaaaacagcactaactcggcaagcgatatcaactctataaaagaagaagttgaccagcgcctggcagagattgaccgtatttcagaacaaacgcagttcaacggcatcaaagttttatccggcgataaaaaaatgagtttccaggttggtaccaatgatggtgaaacaatcgatattgatctgaagaaagttgaccgtgaggcgctgggtctgaaaggtatggatttctccacactgagtgccgtgtatcgtcaggaaggtgcaacgaaaactgcagatgaatttgacgatggtgcctcaacgccaaataaagcagcatcatttgaattctcaggtgtgacctggtctacagcaccgacagagctgaaagaagccaaagatgaaaacggcgttgcaataaaagatacctacctggtcaccggtaaaatagatgacggtaaagggggaacgaaagatgttacttatgaagcaaaagtaaccggtgtggaaaaagatgctaccggtacagattatcatgctaacgtcagtgttgataccagccgtgaaatcaaggtactggcagcaggtacgaaacctccggcagatgaaatcctgaagacgctggatgatgccctggccaaagtggatactcagcgcagccagctgggtgcattccagaaccgtatgcagtccaccatcaataacctgaacaactctgttaacaacctgagtgccgcacgcagtcgtattcaggatgccgattttgccgttgaagtttctaatatgagtcgtggccagattctgcagcaggcgggaacatcagtgctggcgcaggcaaaccaggtaccacagtcagtactgagcttactgcgttaatcattatttcattataaatcaggcaattcctctgtgttatggtttggccggaaccactgttccggctttttttatgtctgaggaaaccatttctgcgacaattttctaaaaatatttaccaaaaaacctaaagtggtctctcagggtgccgatagtgttattgctggcgaaaatcagaaagccaaacagataaacgctgtttattattttcaataacaaggacatatatcatggcacaggttatcaatactaacgttctgtctctggttactcagaacaacttaaaccgttcacagggcgtattaggcactgcaattgagcgtctgtcttcaggtgcccgcatcaacagcgcaaaagatgacgctgcaggccaggcaatcgccaaccgtttcaccgctaacgtaaaaggcctggcacaggcttcccgtaacgctaacgacggtatctctatcgcacagactgctgaaggtgctgttaacgaaatcaacgacaacatccagcgtatccgtgaactgaccgttcaggcgaaaaacggtactaactccaagagcgatatcggttctatccaggaagaagtgaacgagcgcctgtcagaaatcaaacgtatttctgaacaaactcagttcaacggcattaaagtgctggagcagggcactaaaatgaacttccaggttggtgcaaacgacggtgaagtcattgaactggatatgcagaaaattgatctggctaaactgggtctgaaagatttcgaactgccgacttatactgctctgaaatcagatactaagcttgatgcaacagcagaaaaagcagaggctgctaaagtagatgcaacatttacgactgttgatctgaaaggccacgaactgtttgaaacagcaaccggtactatcgttgctaagaaaggtgcggattattttgaagtgaaaaccttcgaaaaagacggaactacagcgacacaaggtaacctggtcgttggtgataaactgactgatatcaagtccaaagcagatgctgacaaagtcaacgatgcaaccaccaaaaaactggacgaagcactgaaaactgttgactcataccgttcaaaactgggtgcattccagaaccgtatgcagtctaccatcaacaacctgaacaactctgttaacaacctgagcgcagcacgcagccgtatccaggacgctgacttcgcaacagaagtgtctaacatgagccgtggtcagatcctgcagcaggcgggtaccgctgttctggcacaggcaaaccaggttcctcagggtgttctgagcctgttacgttaatttacgtagttgctttagcgtgtttaaaaggtcagaatattctgacctttttttataggtgttacccataacagaacaaataatattctaactatttgtttttttattctattaatgaacgcctatttttctttttgtcatataaaataaccggaattttgcaaaatttatgataaaaatgaaagagagtattgctatttgttaatgaggtgatttaggataaggcaaataaggcgtgatttacctcactactcaccggattgaattcttttcagggcacgataataaaagcctttcatgaatctcgaagggtgtttcaggttgtgagtgatttgtataccgccgaaggtgttatcaacaaaaatagcctgtgggagcgttattatccccttatccggcacgaagccctgaagttgcaggttagattaccggcaagcgttgatattgacgacttaattcaggccgggggtatcggcttgctgcatgcagtggagcgttttgacgccatgcagggtgccacctttgcaacctatgcggtacaacggatccgcggggcaatgctggatgaattgcggggaagagattgggccccccgcagtgtgcgccgtcaggcgcgggaaataaccaaagccgtgcgtgcgctcgaacagtctctggggcgtgcagccgcagagcaggaaatcgctgattcgttacagatggatatcgcagaataccgtcaggtcttaaccgataccaataacagccagctgttttcatacgatgagtggcacgaaatccacggtgagagctgcgaacccgtccgtgatgatgatgacgggggcaacccgctcggtttgttggtagacgagagtttgcgtcaccaggtggttgaggcgataaaacaactgcctgaacgtgaaaaactggttctgactctttactatcaggaagagctgaacctcaaggagataggcgcagtgctggaagtgggggaatcccgcgtcagccagttacacagccaggcaatcaaaaggctgcgggcgcgcttaaaatccatgaagtaactttgactttatctttgatttatttttattagactagactacacaaggcgccagaatatgtctgtttcaaaacaaaagaaacggcccgtaagccgttacattaaagacttcaaacacagtcagactcactgcagtcattgtcacaaaaccctcgatcgcatctccctggttttcaacggtcagctgatcaataaagaagctatttctgaaatgacagatatgatcgatgacaccacctggatgggattacaggacaaatttgtggcactctgccgtttctgcagcgagatctactgcaacagtgcaaccgattatttcgatatcatggcattcaaacagtatctgtttgaagaaacggaaatgagccacagtaccgtgcgcgaatatgttgtccgtctgcgccgtctcgatgaactgctgtcctccaaagccttcccggccaccacagaattctccactgaaattatccaggctcagctgagtgaagatttatctgactccgccctgagcaactacaacatcgcactgcgcaagtacgaacagtatcttgactggcagggcaaacactgatttatcagtcagaccattttttatcagtaaatgataaaacaaagggaactctcgttccctttttccgttttaagactccgtgattatcagccgatagtcatcagactggcgtttccgcctgccgctgcggtattcacactgaccgcacgctcatgcagtaacagcatcagcgggatctgtgtatcaccgtgactgagcccggcaaccggcacaatttcaccgccgcgtgcagccacatcccggtttactgcctgcaggaggtcactgtcaccatggaaaatcacaccgttaaagaccacaccatccgctgaccactcttctgtcagtgtgatttgcgcgcggacgctgtccggcagagtgttatacagtgaacgggtatgttccgccgcaggccagagctgacggcagcccgctgccagtgtggcacccagttgtagcaaagcatcctgttctgaatcattcaggccgagaatggttccgcgcggcagcagataataactgttgcgctccccggtcggccccggcagcagacggcaggtaccggcctgtgataactcgccgtaacggataaccgctgtcagcacatcgtggcggcgctgcgcttccagccaggtgaggaaagtatcaaacggcgccagtaactgtgtccgcagagtgacatccggcggattgagatcatcctgttctgccagaaggctgaccaccgaatcatcaggctgttccgccagcagacggtggagataaagcgggccgcctgccttcggaccggtgccggaaagcccttcgccgccgaacggctgaacaccgaccaccgcaccgacaatgttgcggttgacataaatattcccggcttcaatctgttgcgtaagctgtgcgatagtttcatcgatacgggtatggataccgaatgtcagcccgtaaccggcggcattaattttctccgccagttccggcagcgtgtcacgcgggtagcggaccacatgcaggacagggccgaaaatttcccgtgtcagttcagagacatcatccagctcaatcagcgtcggcgggataaaggtgccgttaagaatcgccggtgaaccggtttccatcccgaaggcggactgatacaccggtctgcctttaccacgcatttgctgaatatgctggcggataccgttatgtgcctcttcatcaatcaccgggccgatatcggttgccagtatgtccgggttgccgagacgacattccgccatcgcgcctttcagcatttcaatggtgcgatcggccacatcctcctggatgcagagcagacgcagcgctgaacagcgttgacccgcactgtcaaaggcggaactgaccacatcggtgaccacctgttctgtcagggcggaggaatccacgaccatcgcattcaggccgccggtttcggcgatcagcgggatcacgcggccttcggtactcagacgggcggccagattgcgctgtaaaatcttcgcgaccgcggtggagccggtaaacatcacgccctgaacacgcggatcacacaccagctggttaccgactgtttcgccgtcacccggcagcagttgcagcacctcacgcgggacaccggcgtcatggagcagtgaaacggcaacagctgccaccagcggagtctgttccgccggtttcgccagcaccgggtttccggcggcgagggcagcggctacctgaccggtgaaaattgccagcgggaagttccacgggctgatacagaccaccggccccagcggacggtgcgtatcaccggcaaagtgagttttcacctgagaggcataataattgagaaaatcaacggcttcacggacctcggcaatcgcgttggcaaaggtcttaccggcttcccgcaccaggatcccgagcagcggctgcaactgatcttccatcagctgtgcggcgcggataaggatatccgcccgttcctgtgccggggtggcgaaccagatctccgctgcaccggaggcggtggcaagggcatgatccacttcatcttctgtggccggacgaacgtgaccgacaatatcatgatgattcgccgggtttctgaccggctgcggctctgccggtgcggacggtataaatgttccgccggtcagtggttcactgagcagattgtccccggcgtggctgagcagggcactcgacagtgacgccagacgatgctcgttactcagatccagaccggcggcattgacccgcgtattgccgtacagattgcgcggcagcgggattttcggatgcggcagaccgacagcaccttctttggcggccattgcctgaactgccgcaaccgggtcttccaccagcatctccagcggaatagtgccgtcggcgatccggttgacaaaggaggtattcgcgccgttttccagcaggcggcggaccagataagccagcagggtttcatgggtaccaaccggtgcatacacgcggcacggccggttcagtttgccgtccgccactttgccgaccacctgctcatacagcggttcacccatgccgtgcagacactggaactcatactgaccgggataatagttattgcccgccagctgataaatcgcggataaggtgtgggcgttgtgggtggcgaactgcggataaatcagattcggtactgacagcagtttacgggcacaggcgaggtaagagatatccgtataaaccttgcgggtatagaccggataaccctccagcccgtccacctgggcgcgtttgacttcgctgtcccagtaagcgcctttcaccagacggatcatcagacggcgctgactgcgcgatgccaggtcaatcagataatccaccacgaccgggcagcgcttctgataagcctggataacaaaaccgatgccgttccagcccgccagctgcgggtcaaaacagagtttctccagtaaatcgagggagatttccaggcggtcagcttcttccgcatcaatattgataccgatatcatactgacgcgccatcaccaccaggtcgcgcaggatcggataaagttcggacatcacacggtcatactgcgcgcggctgtagcgcgggtgcagggcagaaagtttgatggagatacccggcccttcataaataccgcgtccggcggaggctttgccgatggcgtggatagcctgctgataagagaccagataggcctgtgcatctgcggctgtcagtgcggcctcgcccagcatatcgtaagaatagcggaagcctttggcttcatttttgcgggcgtttgccagcgcacgggcgatggtttcaccggtaacaaactgctcgcccatcaggcgcattgccatatccacgcctttgcgcaccagcggctcaccgcttttgccgaggatgcggttcagtgagcggctcagtcccgcttcattatgcgtggcaaccagcttaccggtgaacagcagtccccaggtggcggcattaacaaacatggatttgctctggccgaggtgagaattccagtcaccgtggctgattttatcgcggatcagcacatcgcgggtggctttatccggaatacgcagcagtgcttccgccaggcacatcagcgcgatcccctcctgggaggagagggagaattcctgaagcagtccctgtaccagcccggcgcgtccgctgctgtttttctgattacgcagcttttctgccagaccgtaagccagtttatgcgtggcctgtgcggcatccggggagagttgcgcctgcggcagcagcatagcgactgcttccggctccggaatgcggtatgcggatgtgatagctgcgcgggtcacggattgcggcaggatatcaccggcaaactccagaaacggctggcagctgaccggcggctcagccggtacagtttcatcttcctgtgcggaagggataccggcagcgggcagtgcgccgtccggcagagaatcgagctgagccaggtaatcaaaaatagcctgtctgatcagccagtgcggcgtgcggtcaattttttgcgctgcggctttgatccgctcacgggtttcatcatccagtctgacgcccattgtggtactcaccatgttcactcctcataaacggcaacaggtcatgcgttgcacattaatatctatgaggttgcaactttgtgcaacattgttaaataaagagatgtgcaaagtgtgaataatgtcgctgttttatactgatctgagaaaatgattaagaaacaaactgtattggttaaaataaaatcattatataacaatagtatattgtcagttttaaggcgtataatgattaaatcaggtgattaaccgcatcactttctgatgacatatcccgtgataaaaatcacaaatcttcactttagtatcgttaattaattgttgttttattgttgttgtcgttactatcgggctgaacacaactcatcacagatttaacaaataatgataattgacggggcattgtctgtgcagaccagggatggctgaggcgatgtgcaacacagtaacaccggtgtgacgcgcatcctgtacagcgattggtacacgcaatgctgatacgtgacggactataaattcagtacaggaacttaattatgacaatgacgctgaccacaccgctgattgtgacatttattgtctatatcgccgggatgctgttcatcggctatatggcctaccgctccaccaataacttcgacgactatattctcggcggccgccggatgggcagttttgtgactgcattatccgccggtgcatccgacatgagcggctggctgctgatgggattaccgggtgtggttttcttctccggtatttccgaatcctggattgccatcggtctgtgtatcggtgcctggcttaactggcggattgttgccggtcgtctgcgccttcagacggaagtcaaccatgcgctgacgctgccggattactttacgcagcgttttgaggataaaagccgtgttctgcggattgtctctgcagccgtgatcctgattttcttcaccatttactgtgcttccggcatcgtggccggtggtctgctgtttgaaagcaccttcggtatcagttatgaaaaagccatgtggctcggggcaggggcaactattgcctataccttcctcggcgggttcctggcggtaagctggacagataccgtgcaggcgacactgatgattttcgccctgatcctgacaccggttatggtgattgtgtctgtcggcgggtttgatactgcactggcaattatcgaagcaaaaagcccggcgtatgtggatatgttccgcgggctggatattgtcgcgattatctccctgctgggctggggattgggctatttcgggcagccgcatatcctggcgcgctttatggcggcggattctcatcacaccatccgcagtgcacgccgtatcagtatgacctggatgatcctctgccttgcgggaaccatttgtgtcggtttcttcggtattgccttcttccagcagaacccggaactggcgggctcggtgactgaaaaccgcgagcggattttcatgagcctgacctctatcttattcaatccgtggattgccggtattctgctctctgccatcctggcagcggtcatgagtaccctgagctgtcagctgctggtcagtgccagtgccctgacggaagatatctacaaaccgtttttccgtaagaatgcctcacagaaagagatggtgctggtcgggcgcattatggtgctggtgattgcggcgatcgctatttacattgcgatggataaaaataacaaagtgctggggctggtcagtaacgcatgggccgggttcggcgcagcattcgggccggttatcctgttctctgttatctggaagcggatgacccgtaacggcgcactggcggggatgtttaccggcgcggtgacggttcttatctggatagaatataagtggtttaatttatatgaaattatcccgggctttattctggccggtattgctattgtggtggtcagcctggcaggccgtgagccggacaaatcagttcagggacgtttcgctgaggcggaagaccgttacctcggacggactgagtaacagagtataaaaacaaaaatcccggcgttgccgggatttttttgtccgctacttttgtgtttccgcaaggcggtgctttctgacattccggtaaccgactgccagcaggataaaccataacggcgtggcaagcagtgcctgacgggtatcgctctccagtgtcagcaatacaattacaaagacaaagaaggacagacacacccacgggatccagctgccgaacggtactttatagactgatgcggcatgcagctccggacgacggcggcggaacataatgtagctgtacaggatcatgctccagataaacataaacaggatagcggatactgttgttaccagagtaaacacatgcatcacatcagggataaagtagagcagaatcaccccgacagacaaacagatgcaggtgaaaatcagtccggtggccggtactgcctgttttgacagacggcagaattgttttggtgcgctgccttgtttggctaacccgaacagcatccggctggtggaaaacacaccgctgtttgcggaggatgcggcggctgtcagcaccacaaagttcaccaggctcgctgccgccggaacgccgatcataacaaacagttccacaaacgggcttttatctgccggaatggagcgccacggcgtgacagacataataataatcagcgccagcacataaaatgcaataatccggaacggaatagcattaatggcacgcggcagggatttcaccgggtcacgggtttccgctgcggcagtacccaccagttcgataccgacaaaggcaaaaatggctatctggaacccggcaaagaatccgattatccctttcgggaacatgcctccgtcggaccagatattggataacgccgcctcatgcccttccggtgaaacaaaatgtgtgccgataagaatgccgccgataataatcagcgcgacaattgcgacaatttttatcatggaaaaccagaattccatctcgccgaataatttaaccgttgccaggttcagggacagtaacagtaaaatacagagcagcgagctgacccagcgcggaaaatcaggtgcccagtgcatgatatagccggtaatggctaccacatcggcaataccggttattacccagcagaaccagtatgtccagccgacaaaaaaaccggcccacgggccaatcaggtcaccggcaaaatcactgaacgatttataattcaggtttgacagcaggatctcgcccattgcccgcatgacaaagaataagacaaacccgatgatcatatagacaaataataccgaagggcctgccagtgaaatcgttttaccggagcccataaataacccggtgccgattgctccgctgatggaaatcagctgaatatgccggttggttaaactgcgtttgagttcgccgcgtggcggcgtggcaggcgttttttcgtccataaacaaatccgttaagctaaaaaataaccattatttttattcattcaaaaatggtgctgtaagcgaatagtgtgacacatttctcagaatgagtaacgagaaattttccgttaaattcatggggttgttgtgtgatatagcctgcaggctattgtttcgcattagtttttttatgggtgaaaataatgtcacgctggtttacgaaacatcagaaaagggcattttttgcagtaacattaataagaaaacccaaaccggcggtaacgggtcagaatagtatattttggggattttccggttatactggtgatatatttcaggggtgttttttattgcggaatggtatttatggacaaaaaaacacagggaatgacgatgaattaccaggttgtccctttttggatctattcaggaagagttgccttttttatattactcgcggtgcttaccggtttttggggcatgaatgcatttctgctttatttgttatttcacggaattgtctggcagttggtggtttctctccggttacatacattaaaagagaaggggctggtttcccgcagccatgatatcagccactggatagtgtatgtttacagcataccggtgaaagaagagcgggcgattttaaaaaatccgtgttttgcacttgaacaaaatatgaaggattttttcttccgcctgctgttactgaaaggtatcactcaactgggttttattgtgctgttactgattcagtatatccggacagatacggatatcgtcagcctgaccaccctgtttgcgggattatccgccattattatagccgtcatgctttaccggacaggattgcttatccgtgcattatcagccaatgcgttttatacggaaaaactgcagtcagaaagtggttctctctggtatcagctctgttttatttcacatggctcagtgaaaatggcagggctggataaattactggcaatataaaacgatccccgcagtgcatattatctgcggggaattttccggactggtattattcagatggcggaatcgcaggttattttttggcaatcgccttatcagcgcgcggctcgacggtaatggaatgctcaacctaaaaagatttttacggattaatctgacaggggctgtcataacaggttcatgcaggataacagggaatgttcagataacattataatctgacactccctgttatatatacctaaccggcagggatgatgttttttttctttgtcagaaatttacgtgctatacgccacacgaaaatattaccggataatacaatattcagacggaatttgttttttcccggttttctgattaatgtaaaatcagatttatggtagctgaagtctttgatataagactttaaatccgggtaaagaccggtagccagcatgttccacataaactgaatctgcaggcttaatactttagcgcggactttactgaaaacggatgatttatccggtttattatacgtctcagcgatgtaagaaagaatttttttccaggcatccaggtcactgatgtaatccgccttcttccattttttattcatcagtgattcactgtgataaatataattgtataaatactctttaatataggaaaaggcgcctttgttcagacattcaaggataaataaaacatcttcacccacaaccatggatgaatcaaaaaataaattattcttatccagaaactcttttttcagcattaaacagcagatatcaaaataatcaaagttcagaaagtcggtaataacggtatctgtgttgtcatagcatactgactgtgtaatatggccgtcggaatgtatttttctgaataaacagtaggcgaaatcccggtcatcctgtgtgactttactcaccagtgtccggataaagtccggttcataagtgtcatcgctgtccagaaagcagatatagcatccggaggccgctttaataccttcattacgtgcggatgaaacgccgccgttctgtttccggatataccggatgtgatcgtggctgctcatatactcccggcagacggcggcggtattatctgacgaaccatcatcaataatgactatttcgaccgacggccaggtctgttttatcacactgtccagagcgcggccgatgaatttttcagcattgtatgccggaatgatgaccgagactaaagcgttgctgctcatataatcgactcttagcatattgctggttattcagtcacaggatttttatatgtctgatactgatgtaaaaatgacgcctgcaacgaaataaaccatttccgttctgtcctgtcaatctttaatggcggggacagcataccggaagtgacagaccggtatactgcgtccggtttgcccggcattttataactgaacagtatgcggctgcttacttattcttgttgaaataagatgaaaacggaatcgcataaccgtcagttgaaaggatccgatcatgctgtttatccggttccgcaatcgactggtctaatgaataaccaagcagttcagataaaatatatttgttcattaatccgctgatccagccatcctgattgcggtatttttcaataaattcacagccataagacggattccctgatttatataaaaacggaatcaggaattgatccgcgcctttggaaaaaccgtggcctttaccgacaatttctccgtgatcggaggtgtagatgaaaatatagtcatcggttactgattcaacttcatcataaagacggccaatcacattatcggtgtgacgaatggtcagatcatagtcaccggcgtcattcagctgctgcttttctgtttctgtataatttgtataaggcatgtggttgccccataaatgcagaataataaatttgtattcatctggctcggccagcgcctgctttaataactcaggcagtttcatgtcattgttttcttccacaataacagtattattccgccgggcaagatagccatattttgaaccgttaacgccgaccagagactgagcgcccagccagtaagttttgtatccctgatcctgtgctatttcaataaccgatttctgacggaataaattttcttcgctttccggtgtgtaaaatgaaagtgacaatgaaatggaatcccgtgttatcggggaggatgaatgcactttgtctgtcacgcaggccttgtcacccatgaaaaatgcgttccatttccggtgttgtttctttggaatacccgtagatatgatatctggacggagatgatgattctccgatgataaagatgatgagtttattctgtggttttccggcagacgccagcacccggtttggtttccggtcaggataattctccgtatacttgtcatggctgagagcaacggaggaaacatacataatatttccggcgacaacaggaaatttctcgcggagatacgtccccagttcataagggtcttcgctgaaattaatggataaattacggtattccgggatgacttcacggagcagggaaatcatcagaaagccgaaaatgaacaccggtgataatgtaaaccagcggggaaggcggagtctttttctccggaatcagataaaaattaatacgcttatgcacagggcaggcaatatgatggaatataaatagtgccccagcatcagtgttgcttcagaattatttgtttccagtgctgaatcgagaacaccggcagaaattcgttcgtggaattcggtgaaataaccgacttccagtgaaaaaattagtgtaataataaatcctgcaacggcaggcagccagtgtttacagttcagaagaataacggtacataaaaccaaaaacagggtggctaaatgcgggccggttgaatcacgctgatacaagaatgtattggtgagataactcaacagcatggcagcgacaaataacagcgggtatttatattttttcagcatcaggtcaaagatcaatattcggaataggattaagttttttcagcactaaatgctaaaggatatttgacgggaatacaatggctgtaaaaatagtgttcttcatattttattaatcaaataattttttattaaaatcttccataaaaaatttatgttgtcagtatcataaagggaagttattgatgtttttttatatcacccggctggattagaacagtttaaagtgttatagcgaaactggtcattaaacttattcctgctgcaaaaaggctaaattcaggttgttttcccggaaattatcgccgatcctttctgctattacgcactgacgccggccggaatacgggctattcagtcagggcagccaaccgaaggaggtattatgtggaatatacacccgacacgcagtcgctatgcattactggctcagtatctgtcgccgctggatgccaggattgaagccggattgctggaatccgaagggattgaggtgatgctgctggatgaaaatattgtctggaataaccagatgtatgctcaggctgtcggcggtgtgaagttgctggttaatcaggatgagttaaccagagcacaggagattctggcggattatcatcacggggatttcgggattaatgaggaaggggaaccggcggcggctgagccggaaccggtgactgaaaacagtaaagaagattatgtcaatatagggtttgtgtttcttattttcctgacgctcggcctggctattccgtttaaggcgctgcatcatcgcctgaaagagaaaacaaaataatgcccggatgacgggaaacccgccatccggcagaaacatcagtggtcgacaaacacaaacttcagcacaaacagcagggcaaccagaatcacacacggattcagctctttccagcgcccggtccccagcttcatcacagagtaagagataaaaccaagcgcaataccgtctgtgatggagaaactgaacggcatcataatcgcggtgataaaggcaggtaccgcgtcagtcaggtcattccagtttacccgtgccaggctcgacgtcatcagcaccccgacataaatcagcgcaccggcaaccgcataggctggcaccattccggccagcggggagagaaaaatcaccagcaggaacaggatcccgaccaccacggcggtaagcccggtccggccgccgacagaaacccctgaggtactttcaatatacgcggtgacagatgatgtgccgataaacccgccgatcacggagctgacactgtccacatacaaggctttctgcatattcgggaatttaccgtctttatccgccagtccggctttatcggttaccccgataagggtacccgatgagtcaaacaggttaaccagcataaacgagaaaataatccctgacagcccgatattaaaggcaccggccacatccactttacccagtacgctggtaacatccggcggcatggagaaaataccgttataggtgacatcccccagccaccagccaatcagtgtagtaaccacaatggagatcagcaccgctgcgtgaataccgcgggaggccagaatcgtgataataaaaaagcccagtgcgccgagccagacggagtgggcggtcagatctcccatggaaaccagcgtggccggattcgccacaaccaggccgatatttttcagccccatcatagcgataaacagcccgataccactggtgatccccacccgcagactcagcgggatattggctatcatccagtagcggatgcggaagaccgtcagcagcagcatgccgagtgcaccccagaagatagcccccatccctatttgccaggagtaacccatggcgctgaccacaccgaaagcaaaaaaggcgttcagccccattgccggtgccagtgcgaccggcagatttgccagacagcccatcagaatacagccaaatgccgcaatcagacaggtggtgacgaagacagcctgtgtatccatcccggcagcgccgaggatttgcgggttaacaaaaatgatatacaccatggtaagaaaggtggttataccggcgataacttcggttcgtgccgtggtaccgtgtgcctgtaaacggaataaacgtcccagtacacctgtttcccggatggtttccggtgtttgactatccattttatgctcctgtctcccggggaaaagataactggtctgataaatgcataatcaatgccagcatcgtaatgacattccgtgagaaaccgtaatcatccggttgtgtcgcaataatttgtaacaattgcggcggggatcacctttattccggtacacctcacaggacagagagaacaccgcgaattcgcattatcaatgtgagagaaaaacagggggacagtgatgaacagtgagaaaaataagcgcacctgcacgcgcagccgcgaagaaatgacaacactcctcgccgtggcccgcagtgaggcaccggcggattatcgtattgataatgtccggattctggatctgattaacggtggtgaatttccgggcccggtagtgataagcggaaatgccattgccggtgtcggtacggtatataaggatgcaccggcgcatcaggtcatcgacggtaaaaatgcggtggtcgtacccggatttattgacgcacatctgcatattgaatccggcatgatgaccccggtcacctttgagagtgccacgctgccgctgggagtcacgaccattgtgtgtgatccgcatgaaatcgtgaacgtcatgggcgaagagggaattgaatggtttctgcgctgcgcggaacaggcacagcagaatcagtttgttcaggtgagttcctgtgtaccggcattaccgggcagtgatgtgaacggcgcggatttcccgctgacagagatgctgaaatacaaggatcattcccatgtgctgggactggcggagatgatgaatttcccggcggtgattgccggtgaggcagaaacgctggataaactggatgcattccgcgatatgacgctggatggtcactgcccgatggtcaccgggaaagatctcaacggctatattgccggggggattgaaaactgtcacgaatcgcaccgttatgaggaagggctggaaaaactggcactgggaatggcgctgatgatccgcgaagggtcggcggcacggaatctggatgcactggcaccgcttatcaccgcgatgagcagcccgcagtgtctgttatgcaccgatgatcgcaatccgtgggaaatcattcacgaggggcatatgaatgcgctggtgtatcgtctgatcaatcagcatcagattccggtacatattgcttaccgtgttgccagctggtctgccgcccggcatttcgggctgaaaaacctcgggctggtggcgccgggtaaacaggcggatctggtcctgctgcgggacgagaaaacagtcgatattcaggcggttatgtgcggcgggcgctgggtggataaagcggcgctgctgcgtgagcggaaggctaaacaggcagcatcacgtccgccaatgcagaatactgtccgccggcaggccgtgacagcacaatctcttgcttttgtgccggttgccggtcatgagtaccgtgctatcagtgtgatcccgaatgaactgatcacctgtgagcagcgggtcagctgggacggacgccgctatgactgcgataatatctgctcgcttgcggtgattgagcgctatggccgccagacaccaccggcaaccgcattactgcataatttcggtctgacgcgcggggctctggcgtcaacggtcagccacgacagccataatattgttgtcgccggtattgatccgatggatatggcgctggcggtgaatcagctgattgccggtggcggcgggatgtgtgtggttgcggacgggcgggtgctgagccatgcgacactgccgattgccgggctgatgagtgataaaacggcggatgaaatcgccgctgaaattgaatcgctgaaagcagcctgccgcgattgcggggtgatgctggatgagccgtttattcagatggcattcctgtctctgccggtgatcccgacactgaaactcaccagtctcgggttatatgatgtgaacaaatttgtttttacgcacagtgagttaaccgcataaacagaaaaggacagagacgttttgtctctgtccttagtcactattcactgcagcgaaaactacagcacgcggctgagaaacgcggcggtacgcgggttttgcgggtgattaaatatctgctccggtgtgccggactcctggatgatcccctggtcgataaaaaagacgcggtctgccacttcgcgggcaaaattcatctcatgggtcacaatcaccattgtcataccctcatgggccagcgctttcatcacattcagtacttcaccgaccagctccggatcgagcgcggaagtcggttcatcgaacagcagcaccgtcggatccatcgccagggcacgggcaatggccacgcgctgctgctgaccgccggataaattctccggccaggcatcaattttgtccggcagcccgactttttccagtaaccgttccgctttaagcagcgcatcggcttttttcagcccggacaccatcagtggcgccatggtaatgttatccagcaccgtcatatgcggaaacaaattgaagcgctggaataccataccggtatgttcgcgcattttgttcagatctgttttcggatcacacacatcggtgccgtttaccacaatctcaccggaatccgggcgttccagggcattcaggcagcgcagaaaggtactttttccggagccggacggccctatcacacagacaacttcctgcggacggatatcacagctgataccgcgcagcacatgagtattgccgaattttttctgtaaattattaacgtgaatcacttctgctcaaccttctttcggtgtattgaaccaactgcgccagcaggaatgtcagcatccagtaaataacggagatgaccaggtacggctcccagtaagttgcatacgcgccggatactgtccgcgcggcatatgccaggtcggcaaggccgatagcagaggccagggaggaatctttgacaatcgcgatcgcattgttacccagcggcggcagaatacggcggaaagcctgcggcaggatcaccttacgcatggtttttccccagctcatgcccagtgcgcgggaggcttctgtctgaccgcgatcgacggactggatcccggcgcggaaaatctcggaaacatacgccccggcattgagtgtgatagcaacaatacaggagagaaatgcaccgtactcagagcgcagcattctggccgtgtcagaggtaataataccgctggtgaccatcaggccgtcacgcgggttgataaacagcggcaccagtgcgaagtgaaccaccatgatctgcacaaacagcggcgtgccacgaaatgcactgacataaaaccgcaccggatactgcacaaagaacagcagcagccattttgccgggccgcgttcggcacgggctgtccggccgaggccgagcgtcagtccccagagagtccccaggatgacacagataatggtacattttattgtcatcagtgccccgtccataaataacggagcgtattcttctataatttcccagcggaaagctgacataacatccatcctgaaaaaacagatcaaacccgccgcagaagcgggtttttaatcagataaataatgaattactgcgcgggcagggaaggtacgtcgttatcgaaccatttctgatagattttggcgtaagtaccgtcggcaataatttttgccagaccacggttaattttttcctgtaattccgtattacctttagcgacggcaatgccgaaatactgtttttcaaaatgattgtcgtaaatcagtttaaatttcttatccggatgggttttaatataaaacttcacgacaccgacatcaccgaccgccgcatccacgccgtcttcatataattcctgtaacagcagcggagtattatcaaagcgtttgatggcggtgctggttttgccgagcacatcagaaaccacaatatccccggtgctggagttcaccacaccgacattatatttactcagttcagataacgcgctgattggtgaattttcattcaccacaattgcctgttccgccgggaaatacggggcggagaaatccaccatctgtttgcgtttatcggtgatggtaataccggaaattaaaatatcgcgatccccggcggacagtgtggcgaaaataccttcccacggcgtgttgattaatttgacgtcaaaatcttcggcggcagcaaccgctttgataatatcgatatcaaacccttcgagttgtttttcactgttttcaaattcaaacgggcgataggtaccgccggcaccgatcacataggtttctttggcctggcttaccccggtgaatgctaataatgataaacagcctgcaaagactaattttttaaacatgacaacctcatttttatgcgtgatttttaattaaaaatacataaatattcatttaatggcaataactatttaaaaataagcaaggcagcagcagatgatcagcctgcggaacaaagcaggcagagtcttatacgggaaagtgagcaatacagagcggatgtggcggaatgtgcggaggtatgcggttcagaatacaccggctgacattagcggtgtggtgcgtcacgggtgaaccgcatcattccccagtagctgttatgtgttttttctgtcatccgccagccggattgttccagtgcggggcgcagggcgtgattgataatccggtgcgccatgaccagtacagcgccatgttcctgtgcatagtctgagaggatttgtgcggcacattgtgcccgtccgcgtacctgtgccacagagggaacagattttccgccacccgccagccacagcagccggaatgcggttacccaccacatcggcggcagttttaccggcatcagcagtgcaggagagaacaggggaagtactgcttcatgcagttcatcaacaatggcgcggggtgtgatcccgagaatggccagggatgccgtggtacgaaacagcggactggctaccgggaaataacgggacaattcttcagcggacagcgataaaggcggagcggccggcgggataattccgcccgcatcatattccgccagccaggcacagaggttgcgcagggccagcggtgtttttctgtccggcaccggttcaccgtggcggatcagcagaatttcctgaatcatcaggtataaaaatatttcagcacatggaagaaaaccggggctgcgaagcagagggaatccagtctgtccatcatgccgccgtgaccctcaatcatggcaccgaaatctttgatcccgctgtcccgcttgatggcggacatacacaacccgcccgcgaaaccggccaggcaaatcaacagtgagagcaggaatgccgcccacgggctgaacggtgtggcccaccacagtgccataccgacacagctcgcactgaggatcccgccgataaagccttcaacggttttgttcgggctgagtttcggtacaatcgggcgtttgccgaacagtttaccgaacacatattgcagcacgtcagaaatctgaaccacgatcatcagaaacagcagcaggttgatattatccgtgaaatccggaatcggcagtaccagcagtgcaggagcataactgaggcagtaaaccgcaatcatcacactccactggatttttgccatgcgctccaggaagtggcgggtgtcgccggagagcaccatgcgggtcgggataaacaggaacgcatagacggggataaagaccgccagcaggttataccactgaacaccgaccagcacatactgtaccggcagaatgataaagaagcaccagaacagggcaccgtggtcggcgcggtgtgtcggcgtcagagtgataagctcacgcagtgccagcagggacataaaagcaaacagcaccacagagccgatgggcccgatgctgatagccacggcggcgataatacacatcagccaccaggcgcggatacgggcattcaggttactgataaccgaggtgtttcccttaacctgcttcaggatcaggccgataaccgttgccaccgccaggaacccgaacagcccgctgaagatccagaataattcattatctttcattatgtattgcctctaacgcctggcgggtccgcactaaaaagtccgctttgctctcttcttccccggccggttcaaccggagcgccgaatgtggcagtgcagataatcggcacaaccagccgcgagcctttcggcaggacgcggttgaggttttccagatagaccggcaccagcaccgcatccggattattgcgggataaatgccagagcccggctttgaaatcctgaatcttttcaccgtcgccgcgtgtgccttccgggaacagaatcagggaatccccggtatcgagaacactctgcatcacatccagcggattctccgccggcgtggtctcctgttgttcatcctctgttgccggctcgatttttttaccgcgtgcaatcagcaccgcaccaaaaatacgtttggcaatataacgacggaacccggttttatcccagtaatcctgcgccgccaccgggtgaacgcgttttcgcgccgcaccggtcaggcaggaccaaatcaccagtccgtcaaggtgactggagtggttggcatagtaaatacagggtttaccttccggcagcggggcgttctgctttgcgcggatcccggtcagaaaccggcataccgacaccagcagcgccgagacaattttttgatccggcgaaaacgttttacgggtcatcctttattatccttacgtaaatcagccatcagtatgcgggtacggcgcacggcggtccagagtgcgccgagggtaatcacccacagtatgataagaaacagccactgagcctgatacagcgggagaaaacaggcggcaacggcaccggcggtcagcagcgccatccggtgctgtttggccatcgggccggaaaatttctgcggctgctcacaactgccgccgagcacccggacataggcggtcatcactgccatcagcgccgccgcccagccgagctgcggggcataagcgataaaaccggccagtccgtaaccggcaccgatgaggatcaggctgtccgaaacgcgatccggcaaatcgttaaatacggcaccaacagggctgcgcaggccgccttcgaccgccaccataccgtcaagcagattacagataagccgtccctgtaccatcagtgcggccagcagaaacaggatgatacgcagtacggtgagctcgctgttcagagcaccgtaaaaggcggcagcggcaaataatgcacagactgaactggcgacagagataccgttaggggttgcaccgcgctgttgcagcagacgggcggctgaggtcgcccagcgggtctgccgggctttaatcggacgtcggtccctgatttcttctgattccatatcctttccgtcatgtgaaaattaatctgttgataatataaggtttcgtaacttattaataatagtgatgcagcaaaattgccaaatatttctttacaccacggcaggtgaggataacggtatatcttagctgaaaagcgactaaggaaagccgccgcccttatggcaggataacagcataaccaggcagactattattgaggtgattatgtcagaacatgcacgccgtcctttgcggacagaaacccggctgacgcagagcggccgtaaccccgcattacagcacggatttgtgaataccccggtataccgcggctcgacggtggtcttcccgacgtatgatgccctgatcaaccgccgtgctgaatttcattacggcactgacggcactccgacgatcgcggcactggagaatgcctggagtgaactgaccggtgcggcgggtacggtgttatcccccagcggactgggcgcggtgacactggcgctgctgaccactctgaaaagcggcgatcatctgctgatgaccgattctgtttatcacccgacccggcagttatgcggcggtctgctggcaaagatgggcattaccaccacttattatgatccgctgatcggcgcggggattgaatcgcttatccgcccggaaacaaccgtgattttccttgaatcccccggctcccagacgttcgaggtgcaggatgttccggcgatcactgccgtggcgaaacgccatcatgtgacaaccgttattgataacacctgggcgaccccgctctttttccgcgctcatgaacacggctgtgatatctcccttgaagccggtaccaaataccccggaggtcattcggatgtgctgatgggactggtttccgctaatgcacagtggtggccggaattgcgcaaaacctatgatcagatggcgatgctgccgggcgctgaggattgtttccttgtgctgcgcggtctgcgcactctgcatatccgcctgaaggaagcacagcaccgggcgctgaaagtcgcggagtggctgcagtcccgcccggaagtcagcaaagtgctgcatcctgccttcccggaatgtccggggcatgagatctggaagcgggatttcaccggctcttccggcctgttctcgctggttctgaatgcggaatacaccacagacgacctggcggccatgctcgacgggctggatattttcgcgatgggctattcctggggtgggtttgaaagcctgatagtgccgtttgactgtagccgttaccggacggttactgactggcagccgggcggactgacactgcgtctgcaaatcggcctggaagatacggaggatttgattgcggatttgaccgccggatttgaacggctgaatgccgcacacggacaaaaaaaataagcccggaaatccgggcttgctttcagaacaatggtattaaatgttcggcagataaccggcgcttttgatgaactcgatagagatcaccagcaggccgaacaggaagataaagatcagcacaccgtttccgcctgcaacacggtaagcaccggctttcgggttctgccgtactttccatgctaataatgacggcaggatcagcgccaggaaggagagcgccattgcggcatacgccagcgcaccggtgaagcttttgtagtacagggcgcaaatcagcggcagggcaaaggtcaggatcccggtttgcgtacggccgaaggcggaatttttgcggcggaacaggtcggccaggtaatcaaataaccccagcgccacacccaggaatgaggtagccagtgccagatccataaacaggctgaccgcgatatccacatatttattggccacggtctcactgagcgccgtcagtaagccgtccaggccggatttctgcgccagaataccaaagaaggtatcggacgggatcgcgccgagggtcgcaacctgccacagcagatacgccaccagcggaatagcactaccagtgaggaaaataaagcgcagctttttgctgtcgccgttcatgtaattcaccaggctcggcacactgccgtggaaaccaaaagaggtaaacaccagcgggatagcagaaagcaccagtccgttctgaatcggcatgctgacaaggttggtcatattcacatgcggcatcatgacggcgagcatgatgatcaggaagataattttaccggtgaacaggatacggttgataaaatcaaccgagtgcgtcccgacacacactaccaggccgccaacgagggtgaagataatggtcgccgtacccggtgtaacagatatttgccaccagctttgcaggctggcggagatcatttccccggctccgccgatataggcagtggtcagggcatacatcagcaacaacatgctgaagccggtcaggagctgacccggtaatccgaggtattgacgggagacgctgcctaagccggtatccggtgagctgtactgatacacttcaaccatcagcagtgcggtgtagctcatgatagcccagaggccgatcagaatgacagcaatgaccggaaatccgatccctgcggcagccagcggcattgccagcataccggcaccgatcgttgttcccgcaacaatcagaacactgccgagtgtacgatttttcaccaaaacctcatgatatttcaatcaataatatgtgcgcaaagcgtaatgaaaaaccggaaaggtgtcaaatttaaattacgtatatcgtaaagatatcgttacaccaatggcataaaaaaaccggattgcagatccggtcactaaacagcttacaattcgatgtcgatatcactcagcgggtagcaactgcagggaagaatttcaccgtcattgataaatgcaaccggcctctgccggtaaccgactttaccgcgtttcaggcggacacggcaggcaccgcaatagccttcacggcactggtattccaccgggacggattgttcgagtgtattgagcaggttgttgtgttcttcactgacataatgcagctgaataccctgcatgttgccatgcagggtgattttatagcggggcatcagagttcgaagttactcagttcgtcagtgttgacttcagagtcaatctgaccgaccagataggagctgacttccacttcctgtggtgccacctggacgttatcagataccagccaggcgttgatccacggaatcgggttcgagcggactttaaacggcagcggcagacccactgcctgcatgcggatattagtgatatattccacatactgacacaggatatctttgttcagaccgatcatagagccgttgcagaacagataatctgcccactctttttcctgctccgccgcacggacaaacagatcgtagcaatcctgctcgcactctttggcgatttccgccatttccgggtcatcctggccgctgcgcagcaggttaagcatatgctgggtgccggtcaggtgcagcgcttcatcacgggcgatcagtttgatgattttcgcattaccttccatcagttcgcgttcggcaaaggcaaaagagcaggcgaaactaacatagaaacggatcgcttccagcgcgttgacgctcatcaggcacagatacagctggcgtttcagggcgcgcagggtaacagtaaaggttttaccgtttgcggtatgcgttccttcaccaaacatatgatattcattggtcatgcggataagatcatcataatagccggaaatatcttccgcgcgtttgatgatctcttcgtttgccacgatatcatcgaataccaccgacggatcattcacgatattacggataatatgtgtgtaagaacgcgagtgaatggtttccgagaaagaccaggtttccacccaggtttccagctccggaatggagatcagcggcagcagcgccacgttcgggctgcggccctgaatggaatccagcagggtctggtatttcaggttgctgatgaatatatgcttttcgtgatccggcagggcattgtagtcaatgcgatcgcgggatacgtccacttcttccggacgccagaagaaggagagctgtttttcaatcagtgattcaaaaatcgggtacttttgctgatcataacgggcgacgttcaccggctggccgaagaacatcggttctttcagctgatcattatgtacctgcgaaaatgttgtataagacattatttattcaccttaaattttacacgcgccgccttcacaaccatcatcgtcggcgatgaccacttcctcaggaaggtcttcctgggtatcttccgcgccatcgcgggtattgtggtaataaagtgttttcacaccgtatttataggccagcagcaaatctttcagtaactgattcatcggtactttgccgctcgggaaccgggtcggatcatagttggtgttggacgaaatcgcctgatcgacaaatttctgcataatccccaccaactggagataaccttcgttgcccggcatctgccataacagctcataggcggatttcagacggtcatactccggcacgacctggcgcagaatgccgtctttcgaggctttcacgctgatatagccgcgcggcggctcaataccgttggtggcattggagatctgcgaggatgtctctgacggcatcagggcagacagggtggagttacgcagaccgtgttttttgatctcttcgcgcaggccttcccagtcataatgcagcggctcgttcgtcagctgatccagggttttcttgtaagtgtcgatcggcagaataccctgtgaataggtggtttcgttaaaccacgggcatgcaccgtactcttttgccagctcattggaggctttcagcaggtaatactgaatagcttcaaaggtgcggtgagtcaggttattggcactgccgtcggaatagcgcacaccgtgtttcgccaggtagtaagcgaagttaatcaccccgatacccagggtacggcggcccattgagcctttgcgtgccgcttcaatcggataatcctggtaatcgagcagggcatccagggcacgtactgccaggatagccagctcttccagctcatcgaggttttcaatggcacccaggttaaatgcggacagcgtacacagcgcgatttccccgttcgggtcattcatatcgttgagcggtttggtcggcagggcaatttccagacacaggttggactggcgcaccggcgcgataaacggatcaaacgggctgtgagtgttgcagtggtccacgttctgaatatagatacggccggtagaggcacgttcctgcatcatcagggagaacagctccaccgctttcagcgtctgtttgcggatcgacggatctttctcatactgctcataaagacgctcgaacgcatcctgatcggcgaagaacgcgtcatataaccccgggacatcggacgggctgaacagggtgatatcctggcctttgatcaggcgttcatacatcagtttgttgatctggacgccgtaatcgaggtggcggacacggttgccttcaacaccacggttgtttttcagtaccagcaggctttccacttccagatgccagatagggtagaacagcgttgccgcgccaccgcgcacgccgccctgagaacaggatttcacggcggtctggaaatgtttgtagaacgggatacaaccggtgtggaatgcctcgccgccgcggatcgggctgccgagcgcacggatgcggcccgcgttgataccgataccggcacgctgggacacatatttgacaatcgcaccggaggtcgcgttgatggagtcaaggctgtcgccgcactcgatcagcacacaggagctgaactggcgggtcggggtgcggacaccggacataatcggtgtcggcagggaaattttgaaggttgacgtggcgtcatagaaccggcggatataatccagacgggtctctttcggataatgtgagaacagacaggccgcaaccaggatatacaggaactgtgcactttcatacacttcgccggtaacacggttctgaaccagatatttcccttccagctgtttgacggcggcgtaagagaaattcatatcacgccagtgatcgatgaactcattcatctggtcaaattcagcttcggtgtaatcggttaacagattttcgtcatatttaccggcagccaccattttctgtacatgggcgtataacgccggcggctcaaactggccgtaggcttttttgcgcaggttaaaaatagccaggcgggcagacagatactgataatccggcgtttcagcggaaatcagatcggcggcggccttaatcatggtttcatgaatatccgcggtacggatcccgtcatagaactgaatctgggaacgtaactcgacctgggagacagagacattattcagaccttcagcggcccaggtaatgacgcggtggattttgtctaaatcgatacgttctttgtgaccatcacgtttggtaacaagcagattctggttcatcagttgatataccctgttttgaaaatgacactctgttgtgattaacgcgccgataacgtgtatccgcccgataaaaaacgatccctgaaacaaatgttccgggaaagtcaatagcgggtgctgagcgatttaaacacaagatgtagtgtgtctgtaaaagatgggtaacaagataatgataaatgcgctcaggatcaagtgtataaaatcaggatcttttgtggataacttgaggatagtcacccgctgacagagtggtaagcactgagatcactgacaaaatgaaactgtgcttaccttattacgcgaagcgataattttagaaaaatgcgatttgtttggcgttttattaatcgccggagtaattaacttgacactataaaataaaacgggtatgcaacatataatttacatccacattgggtgccagccagaatttatcgcttaacggattgtaatgtaagccgatcatatgctgctcgcgcagaccggtattattcagccagtcaatcagttctgccggacggataaattttttcgcatcgtgcgtaccgggcggtaccatcttcagaatatattctgctgcgataacggccataaaccaggcttttttgttgcggttaatggtggagaacaccacatcgccccccggtttgaccagacgggcacaggaacgcaccacagacgccggatccggcacatgctcaagcatctccatgcaggccaccacatcatactgttgtgcatgtttttctgcgtgctgttccaccgtttcctgcacataggtgatatcagtgccgttttccagtgcatgcagacgcgcaacctgaagcggctctgcgcccatatccagcccggtgacgtccgcaccttcccgcgccatactttctgccagaattccgccgccgcagccgacatccagcactttcttcccgaacacaccgttaacccgctgctgaatataggccagacgcagcggattgatccggtgcagcggtttaaattcaccctcaagatcccaccagcgtgaggcaacatcctcaaactttttgatttccgcaggatcgacattggctgtcagcggggaagctgtgtcattcatggtctctttctctctcttgctgcggcagaacctgccggaatacgcgatggcgtcagtatacaatgccgggcgcggatgcgtcagaaataaaatactctcccgatttttatatctccttttttaaacattggcgatttgtggtatagttccgcaccttgaatccggagtaatgagggatactggctccatgagcgacaatgccaaagaaatcttgcccgttaacatcgaagaggagctgaaaagctcgtatctggattacgccatgtccgttattgtcggacgcgcgctccccgatgtcagggatggtctgaaaccggttcaccgccgcgtattattcgcgatgaaagaactgggtaatgactggaacaaagcctataaaaaatctgcccgtgtggtcggggatgtgatcggtaaatatcacccccatggtgacagtgctgtgtatgaaacgattgtccgcctggctcagccgttctcaatgcgctatatgctggtggatggtcagggtaactttggttcaatcgacggtgactccgcagcagcaatgcgttatacggaagtccgtatggcgaaaattgcccatgaactgttagccgacatcgacaaagaaaccgtggattttgtaccgaactatgacggtaccgaaatgatcccggatgtgatgccgacccgcatcccgaacctgctggtgaatggttcatccggtattgctgtcgggatggcaaccaatattccgccacataacctgggtgaagtcatcgacggctgcctggcctatattgatgatgaagatatcagcatcgaaggtctgatggagcacatcccggggccggacttcccgactgcggcgattatcaacggccgccgcggtattctcgatgcttaccgcaccggacgcggcaaaattcatatccgtgcccgcgctgaagtggaaacggatgaaaaaaccggccgcgaaaccattatcgttaatgaaattccgtatcaggtgaacaaagcccgcctgattgagaaaatcgccgagctggttaaagagaaacgtctggaaggtatcagcgcactgcgtgatgaatccgataaagacggtatgcgcattgtgattgaagtcaaacgcgatgcggtcggtgaagtggtactgaacaacctttatctgctgacacagatgcagaccacgtttggtatcaatatggttgccctgcatcagggacaaccgaagatcctcaatctgaaagaaattctcagtgcgtttgtgcgccaccgccgtgaagtggtgacccgccggacaatctacgaattacgcaaagcccgtgaacgcgcccatatcctcgaaggtctggcgattgcactggccaatatcgacccgattatcgagcttatccgccgtgcgccgacgcctgcggaagcaaaagccgggttactggcacaggcatgggaactgggtacggttgccgctatgctggccggtgccggtgatgatgccgcgcgtccggaaggtctggatgagcagttcggtatccgcgacggtctgtatcatctgaccgaagttcaggctcaggcgattctggatctgcgtctgcagaaactgaccggtctggagcacgaaaaactgctcgacgaataccgcgagttactggaactgattgccggtctgctgcatatcctgcaaagccctgagcgtctgatggaagtcatccgtgaagagctggtggcagtgaaagagcagttcaacgataagcgccgtactgatatcacagaaaacacagcggatatcaatatcgaagatctgatcagtcaggaagacgtggtggtgacactgtctcatcagggctacgtgaagtatcagccgctgaccgactatgaagcccagcgccgtggcgggaaaggcaaatctgccgcccgtatcaaagaagaagactttatcgaacgtctgctggtggcaaacacccacgacaccattctctgcttctccaacaaagggaagctgtactggctgaaagtgtatcagttaccggaagccagccgtggtgcgcgcggtcgtccgattatcaacatattaccgctggatcaggaacagaacgagcgtatcaccgctattctgccggtccgtgaatatgaggaaggtaagtttgtctttatggcgactgccagcggtaccgtgaagaaaacctccctgcaggacttcagccgtccgcgtaacgccggtattatcgccgttaacctcaatgagggtgatgagctgattggcgttgacctgactgacggcagcaacgaagtgatgctgttctctgctgacggtaaagtcgtccgctttgcggaagatgctgtccgtgccatggggcgtaccgccaccggtgtgcgcggtatccgtctgggtgacgacgatgcggtcgtgtcgctgattattccgcgtggtgaaggtgaaattctgacggtcaccgaaaacggctacggtaagcggacagcggaagcggagtatccgaccaaatcccgcgccactcagggggttatctccattaaagtgagtgagcgtaacgggaaagtcgtgggggcaatccaggtcggtgcggatgatcagattatgatgatcaccgatgccggtacgctggtccgtacccgcgtctctgaagtcagtatcgtgggccgtaatacccagggtgtgacgctgatccgtaccggagaagaagagaaagtggtcggtctgcagcgtgttgcggagccggaagaggatgaaaatgatttctctgaagacggtgaagtgacggatgcggcatctgatgataatgcagaagagaataacgattaatatcaccggtttccggtaatataaaatcagaaaaaccgataaagcaggaacaataatattgttcctgctttttatttaccccgggggttttgtaaacattgcacagtggtatatcctagacataacagtctgaaacctcgtgaatatatcagattcattattggcggagcccctttgagatacttttcatctttccagacatcactgaaaatttcgcgttacctgttccggatcgtcggtgtgatgttatgggggctgggggcgctggtgacggtattctatttactgaatatctataacgggatgcgcaatgatatccgccagcaatattattccgattacgatgccttattagcctatttccggcaatccaccgatatgacccgcgatatccgttatatgaatgaacggtttgtcgaaaataaagaagtacggccgggagagcccgcagaccggaccaccgacggcttttttattgattaccgggcactgaataccaaaggcgactgcgcggccttccgcaccggcagcggcccgtatattattgcattcaaagatctcctgacgtactggcagaacaatatcgccgcaccgatggggctgaatcaggtctttctggtcggctcaaaaaccctgtgtatggtgtcatttccgatccgcaacctttccaccagcagcgaaacgttgcgcagaatggtcaatgattactctcagaactatttccgcctgaaaagtcaggggaaagagcgcaccatttactgggcggcgccgggtagtaatcagggaatggccagcctgtttgtgatgatgccgctgtattatgacgggcgttttctggcactgatgggtattgagcgtaatctgcagctggaaaactttaaccgcctgcgcgatttcccggccaatatggtgattattaatgagcaggatgatgtcgtgctctcttatccggaagaaattaacacacagaaaaataaagaccgttatctggtggacgataattatttcggctatgacgacgaattcacccaactggtctttaaacgcagactgacgccgtcgctgctgagtgtggtatataccacgccgctgagctcaatctatgaaaaactgaaatttcagatcctcaacggggcgattcttaatctgatctctgccattattatcgggttgtttacctggctgctggaacggcggatatttatgccggccgaaaacagcgccatgcgtctggaggagcacgagcagttcaaccacaaaattgtggcctccgcaccggtcgggatttgcattctgcgcacactcgacggtacggcactgctgagtaatgagctggctcataattactggcgtatgctttcgtttgaggatcgcaaccgtatcggcctgctgataaaagataaacggcaggggatggaagatatggtgacccgtaacggcgggcaccttcaggtcagttttgtgcattcccgttaccagaacgaggaagtggcgatttgtgtgctggtggatatcagcgcacgtgtgcagctggaaagctcgttacaggatgcggcacaggcggcagagcaggctaaccagtcgaaatccatgttccttgccacggtcagtcatgagctgcgcacgccgctgtacggtatcatcggtaacctggagctgttacagtccatggcgcattcgcgggatgcccagcgcctgctcggtacgatgaataactcctcgtcattattactgaaaattatcagtgatattctcgacttctccaaaattgaatccaaacagctgaaaattgagccgagagagtttaacttccgcgaacatattcattttgtggtggcaaactacctgccgctggtggcgaaaaaacacctttctctgtactgctttattgaaaaagatgtgccggagctggtctgtaatgacccggtacggatgcagcaggtgatcgccaacctgtttaataatgcgattaaatacacgcatgtcgggatggtgtgcattcacgtctatgtctgcggtgaatatctgcatgtggatattcaggataccggcggcggtatcagtgaggacgagctgcgccagttattcgacccgttctatcagattatgccgaacacggacagcccgtcgcagggtaccgggctcgggctgcctatctgtgaaaaactgatttcactgatggacggtgacatgatggtggaatcgcagaaagaggtcggcagcttgttcgggatccgcttcccgtgctataccgcctatccgtccggtcatcatgcggatattgcgccgctgaccgtaccgctggtctttgagttccgcaacggcgtgctggcggattatatgcagcgttactggcaggatattgccccggcagcggttccgttatctgaatgccctgatattgcctgtgcggtggtgatcacggacgtggtgaccccggcgatgaaacaggcgcgtctgctgattgaactggatgccgggtataccgacaaaccggtgccgatgggcggcaatcactggcggcataatacccatcagcttgacgggttgtttgattttgtctctgaccgcctgaacaaccgctgtcaggaagccgatgatctgccgccgccgccactgccggacagtcagcaggcagcacatgtccggatcctgattgtggatgaccatccgattaaccgccatctgctgtcagatcagctgcatctgttcggcttccacaccgcaacggcggatgacgggctggatgcactcgacttcctcgaaacccatgaggtggatattattctgtcagacgtcaacatgccgaatatgaacggttatgacctgacccgcacactgagagagaaggggatgacactaccggttatcgggatcaccgccaatgcgctggcggaagagcgcgagcgctgtctggcttccggcatgaacgattgtctctccaaaccggtctcgatgcaggcgctgcgcaccatgatgcagcactacatcccgcaggtcacgccgcccggggctgaataaccggcatataaaaaaaccgccgttcatctgaatggcggttttgtatcagtactgtaaaacgtgtccggattactcgtctctgtggctgtcgatagtgacagacgaaaggtaattcagcagagcgatatcgttatccacacccagtttcagcatggcggattttttctggctgctgatagttttgatactgcggttcagtttacgcgcgatctcagtgaccagatgcccttcggcaaacagacgcagaacctcactctctttcggagacaggcgcttatcgccgtacccgttggcattcactttttccagcagtttggaaacgctgtcaggggtgaatttctttcctttctgcaaagaggccagtgctttcggcagatcagccggtgcaccctgcttcagtacgataccttcgatatcgaggtccagtacggcactgaggatcgccggattattgttcatggtcagcacaataatcgccaggtcaggataatggcgcttgatatacttgataagcgtgatgccatcaccgtatttatctcccggcatggagaggtcagtgatcagaacatccgcgtccaggcgtgctaagttattgatgagtgaagtggaatcttcaaattcaccaacaacattaaccgtttccagctgttccagggacttttttatcccgaacagaacaataggatggtcatcagcgataataacattcaggttattcatactcttggttaccttgctgcagcaattcagtgacaatggcatcaatttcccggataccttcatccaccttcattttgtttttgtcagcgatacagcgttctatatcttcacagcgtgatttcagataatcaaagtcgagcacagcaaagacccctttgacccgatgtactgtcagcgccagtggctgcaattcacttaattctgcttccgtgtacatcttacttatatcaggagggactgtggtggcaaacaaatctttatacgtactttgtgccagctgatttttatataacgcaacaacttccccgacggaaagcgctgctgtattaatacccagattcccgggtaagaatctatcatcaaactcatccgaagttaagctttgttcgataagcagcgtaatagcattcagaatttcatcattgaaattataattacactccaccagggaaggcgtaatcattctgtgttcaataatgtcatttcgtaaaaagagtattggctttctcgctttcttatcaaagtcagtcaccaggatgtcatattcatcttgcaataatgcgcgatttttatcaaataaaattccgccgttttcaattataattgcgttaattatttcccgaatactcggattaatgatattgatcttaaacagcgtatcttccagcacctctgacggctcaccgatcatctcggtggcaggcagcggcaactcaacagtgtagtgtgtaccgatgtccggtttactgtctattttcagctctccgctgagttttttacataataaatcacacaaatagaatgccagccccgagttcggacgaccttccgtctccgcgacctgaaacataaacggatcgtgcagattaacgagatcagattgcggcagaccggagccgctggcgattatttccaatctgatattattatgttcatttttaaatatattcttaaggcgaataaccaattttccgtattttaaattactgacggcgtaattcagtaataataaaaatatcttactgataataggaccgtcaccaatgtaattcagctgtttattaatactgttatggaaataaagcggaatgcctttgtcatttatctgacgtgagaattgtttaacgatatcttcgacggtctgtgacaacaggaattcatcattggtcggtttccagtcatcactttccaggtcagccagcagaataatattttcgatccactcacacagataaccggattccgttaccactttatccatcagcatgccgccggcgggatcagtcacatacggtgccagcgtatgcaggtcattaccgagctgtttgaccggcaccaccagctctgaacggatatttgacagcacagactgacgggctttgatacttttcttatactcacggtcagacaattgcaggcggcgtgcggtcagcgcttcctgatccacatcccggaacagaatcagataagtatcattcatattacggaccggattcatactgacttcataaaccacgttatcaatggtggtctggatccggccctggtgctcgcgggccatatcgcgggttttgttcaggtcgctgagggtcagcaactgactggcgatggtattactgaccagccgtttattggcggcaaaatcataaatcgccagcccgataggcagttgcgccacaatttcattggttatcgcctcactgtttctggcctggcggaccagtgtattgagcggggaaatgaaccgtttgcggatataaacaaggccgccgacggagagcatactgaacaggaagacagaaattaacagccagatattggccgccagcatctcttcggccagagatagcagtgagagctgataaaccacctgatacggcatttcacgcagacggtaactgagtttcagtgacaggccgttaatactgatctgcaccgcattcggacggttgctgagggtgtgggtctcggccgggatcagtgacagattggacagatccagattatccggcaccaggttattcaccggtaaatcaaacgccaccacgctggtcaactgaccggggttattaaacattgcgcggtaggtatagtaataggttgattctgacggcatcttggtaaaggaggagagggtttcccgctcatccagcgctgtggaatccgccagcatttccgcccgtttttcatcggcacccaatgtcagcgggctttcgcggtagcgcagctccggacgcagggcagaatgggatgtcaccagcagcagactgttatccagtccgttgaggtaatatacagaattaaactgattttcaccgccccacagaatggtcagatagtctgaaaaacgccgtgcgatggcgtaggtctcatcattggtctggccgaacaggatggcatccacaaccggcacacggctgtcaatccagtaaatatcattcaggatcttatgcggcggaacgagctcaggccgcttctcggtgtccgtggtattggcgagccggaacagctcagcggactgatagcggtacgtttcaacctgatgttctatccgtgtgctgaaactgtagagtgcgccttttttgcttcccagccaggcatcgtaatagttatatccgtataaaaagagagataagactaataacgaaacaaatgatgcataaaagccgggtatcgcataaggcttggaatgtgactgtctgtacatatgttccgttgcgaccttatagtaagtacttgactgtaaattcaccgggaattaattctatcatactaattcccgtcacaataacagcagtattccgccgcagggccggtatgatgcacgaatgttgagcaggcagacaaaaaaatcggatttttttgcatataggggtagacaggttcctcatttttcagcataatcgcgccccatggaaggatggccgagtggcttaaggcagcggtcttgaaaaccgccgacgggagaccgtcctagagttcgaatctctatccttccgccaaattcgccggcttagctcagttggtagagcaactgacttgtaatcagtaggtcaccagttcgactccggtagccggcaccatattaaacccgttaactctcaaccagttagcgggtttttcatttgtgcttaccaaccacactcagggtcgggtgggacatatttgggacatcctcaccaaaaacagcatcgatttgctgcgcatgctggctcagatgacccggtgccaggtgagcataccggcgtaccatttctattgattcccatccccccatttcctgcaatacggacagcggtactcctgcctgaattaaccagctcgcccatgtgtggcgaaggtcgtgaaaacggaagttttctataccggcacgtttaagtgcagtcctgaacgcagtattaccgtcaacgcgcatttttctgacaaccggagtcattgagccgtcagatctgtttttagccttcgtatgcacaaaaacatactttgtgtgattgcctatctgttcacgcaggacgcggcacgcagtgtcgttaagagcaacacccaatgctttccctgatttggtctgatccgggggaatccatgctacttttctcggcatatctatttgtgaccattctaggttaataatattggagcgccgcaggccggtagccagagcaaatgtcacaacagatttaagaggttcactgcattcatcgatcaggcgttttgcttcccgtggctcgagccatcggacccggttattcttcggttttggcacccggatattcggggctttatcgagatacttccagtcgcgttcagcggcgcggagcagtgacttgatgaaagccaggtaagcagatttggttgctacagaaaccggctctgattttttactgactgcacgccgcttcctgccggaaatatgcttttcccaattttctttcagcttctgatttttcagcttactgacagcatcatagattttaatctcatcaatatctgccaggtgcatcccttcaaagtgatcgagccaaaacagtattttggttttatcatcatcaagagattttttgcctgatttttcctcgagccaccgcgtacaggcaacctcaaaagtaaccttcggagtttcacccagtgagtttacgcgccacagctcggcctttcgtttatcatgcaactcctgcgcttgttttttgtccgttgtaccaagcgactccttaattcttttaccattgtgcgagtaactggcgtaccatatctcgcctctccggaagattgacatatcctttcctcttccgcactaatcacgctttccggcgtattgtgcattttgtagttgatggctgcaatgcaatttgcacgggtaaactgccacggcgatttgggcttaagcggatcttttctcgagccggaaagcctgccggaatcaatccattttttcagggtagggtaagatattcccatgaaggcacaggcttcacggctatccatcgggtaggcgtctacggtcggccaatataaagttagggctctgcctctggttaaagtgggtttagttgcaacccccatacttcatcctcctgctgtaacgtacgcacgtaatacccgggcactttcttctcaggaaagcacgggtgattaagtggtttgaatttcggtgtgtatttgccgagtattgcggtgtgttgttcgtctgatgtgtgctgcattaattccgtaaggcaatcccttgctattcgtctgcgtccgttctctgctttctgtggtgttataacttaacgctttcgtctacctgatcatccctgcattacgcttcatcctaaaacggaacatcatagtcaaaatccatcggtggctcattccgtgctggagcttgctgcgtctgcggcttctggcttcctgtctgattgttgctgaaatccaactggttcacgataatcaccggcgctgatcgtttattgccatcctgacctgtccattcctccatgatgaactcgccagtaaccgtcaccttcattccttttttcaggtgttctggcaatttctcagctttcgcgccgaacattttacagataacccacgatgtcttttcgtgctcgccatatccctgtttcaccggtaggctaaacgatgcaacggctttccctgccggagtccatcgttgctcacaatcctttccgagattgctgctgacagtaatcacgttaattgccatttatgccgtctgcttaagttcgttgatcctgatgccggtgaggcgcttacattcatcctgtttgtcgctgccgttcagcattcgccatactttcctgtattcagcctcaatcgtctttgtgtcacttgtgacattaagaaattcggtatagtcacccaaaatctgctctggattacgtggaacaacatcgtgaacctctgtgtcagcatcaatcgcagtttcttcggtaggaatacaaaatgcctggaaagctgcgtatttataggcgatagacattgctttgttggttgccttgcccccgctatccatagcttcgccaaaggtggtcactgtgtgtttgctgccgtctttcgtggcaatgaaatcaaactcagccttcaccacgacataaaataaggtaccgcctttttgtgtctgtcgctccgtgacagaacgctccataatgcgaggaaggataatcaggccatgcttaaccagcgccggggcaagggcgttgtatacagcgtcgatccccctgaacataaacccctgttgtgaattcctgctcccttttttgatgcctgtctcagccagttccttggctacggcacttattgccttatagacttcagacatgattaatcccccaatctctggccggggcgtgattccgcacgcccaccgccgtaataatcaacaccaccgacaccggtagcttttccatgctcagtcctccattctctccacgcctgtgtctcagcagcattccgtgctgctttgatgtttgcgggtagtgggggatagtgaagggcggtgatacggcagatgttgtaaagtgtctcggccacccgttgctctgacagtgaaggctctccggtcggtttcccccgccgttgcaaatccatttgctcaattgctgatttcagggcgcgttgataattgtcctcatacgttccaccggagcctgcgggtttccctatgcgtcgtggatattccatcatgtgaattctccgcttaaaaattctgccggtacccgtccgtttggcaatccgacactttcacgaaaccagtaatcatccttttctttctgctctcgtttcctgcgctgttcggcaatccgttgccgttctacctgagcatcctgtattgtgtatgtgttcatgccggtagcctcattctgcactgatggagaatgcggcttgttttggcgttctccctgcgccaacgccactccgacacaatctgctcaatctgcttttcatccatgtcagcctgattgaacaactcaataacctgttccttggtgtgtttttgttttgcagtcatcagcgacatatctttctcccgtaagctctcatctgtaattggttagccagatcccaaatgcgggactttccggtggatatcgctacccttgccgcacatcgggcaaggcgtaaaaatggcatagagatgcacgccacgtcagaaccgcacgcagcgcgacaaggtttagttttcatgttgtttacctacggatatacctgaaaaataaaggatatattgaaattttattgatgctgattaaaatatatttagtgataacaatgaggagcagattattgaggcttttgctttattacctttgattacagcaaccattcctggcggtatctttttcttcctgtctcatttatgtttgtttccttctgatggacattaaggaaggtgcgatttaatcgtcatatgtgagaacataaagctttctttatcatgagctgtttacaatgcctgccatttccagctattcctcccgtaaatcccgttttcttgaccgtatgaatgttctggtgccgtggcaggatattgctgataagctgcttcacgtctatccgtcatcccgtcgcggccgacggcctttccccctggtgcttatgctccgtatccactgcctgcaactctggtttgacctcagtgacggagcggctgaagacgccctgcatgatgtcctgccgttccgtcaatttgcggggatctgtgacacggtgccagatcgcacaaccatcatgaatttccgccattttctggagaaacatcatgcaggagaacagatactggcactgattaaccagaaactgaagcaggccggactgatgttacgtcagggcatcattatcgatgcgaccattatttccgctccctgttccgtaaaaaataaagccggtcaacgggatcctgaaatgcatcagacccgcaagggaaatcagtggtactttggtatgaaagctcatattgctgttgatgcggccacaggcttgacggaaaaagtagtgaccacggcggcaaatgtgcatgacctgaatgcggcggatagcctgattacggagccggtagcaattgtcttcgccgatgccggatatcgcggggcagaaaaacgggactctctgacacatcgggttaaagagtggtttattgccaaaggtcctcatgccgtaaaaaagctcagacagcatccccggctgaataagcaggcgctgcatgatgaatatgtgaaagcaggtattagggcaaaggttgagcatcctttccggatactgaagtgccagtttggtttcagcaaaacacgattacggggactgatgaagaaccacaaccggctttcaatgctgtttgcaatgtgcaatttggtgcgggcgggacaactggcggggatgtcgtgaaaatcattgtaatatcagtggagcagtgacattttgcttaccctgagttgatgggggagattaaatattgtccaaactggggtgcttactttgccgcgtaaggaggatatccaggctctggatcgtcatgactgattaaatcgcaccttcccaaaatgtcactgctccactgatattacaatgattttcacgacatccccgccagttgtcccgcccgcaccaaattgcacattgcaaacagcattgaaagccggttgtggttcttcatcagtccccgtaatcgtgttttgctgaaaccaaactggcacttcagtatccggaaaggatgctcaacctttgccctaatacctgctttcacatattcatcatgcagcgcctgcttattcagccggggatgctgtctgagcttttttacggcatgaggacctttggcaataaaccactctttaacccgatgtgtcagagagtcccgtttttctgccccgcgatatccggcatcggcgaagacaattgctaccggctccgtaatcaggctatccgccgcattcaggtcatgcacatttgccgccgtggtcactactttttccgtcaagcctgtggccgcatcaacagcaatatgagctttcataccaaagtaccactgatttcccttgcgggtctgatgcatttcaggatcccgttgaccggctttattttttacggaacagggagcggaaataatggtcgcatcgataatgatgccctgacgtaacatcagtccggcctgcttcagtttctggttaatcagtgccagtatctgttctcctgcatgatgtttctccagaaaatggcggaaattcatgatggttgtgcgatctggcaccgtgtcacagatccccgcaaattgacggaacggcaggacatcatgcagggcgtcttcagccgctccgtcactgaggtcaaaccagagttgcaggcagtggatacggagcataagcaccagggggaaaggccgtcggccgcgacgggatgacggatagacgtgaagcagcttatcagcaatatcctgccacggcaccagaacattcatacggtcaagaaaacgggatttacgggaggaatagctggaaatggcaggcattgtaaacagctcatgataaagaaagctttatgttctcacatatgacgattaaatcgcaccttccttaatggggtcactggtttggaagtacaggcctatttatgctagtcagtttaaagtcgttcaccatttagcgttatcctcgataccacttcattgcgaattccttctaattaattcccataagtaaaaataaaaaacaaacctaatatgccttatggcaatcaaaaaattaaaggaaattctatgtctaatacaatgactggttcagtaaaatggtttaacgaatcgaaaggttttggcttcatcactccggcagatggtagcaaagatgtgtttgttcacttctctgcgatccagagtgacagcttcaaaacattatttgaaggtcagaatgttaccttcaatattgaagacggggcaaaaggtccgtctgcatcaaatgtggtgggtctctaaggcgcaccaatgataatagcactgttttttcagtgtccctgttgcagtggaacacaataccggacttcgcactttgatgtttctgcatcaaatccgcatggtgcaaaatgcattttttgtaaaacggtgatgctgttgtccaggcaatagaaaaactaaattccaaggcctgataatattatcaggtctttttattatgcagtaattattccttatcaggaaaaaatgtattctctgaataaattttctatcaggcttcttcacccaaggtacattttaacctggattggtatcctattgcttttctgtttggttcagatgccttatccatggcttgtgtttttaggcgataagttaggtcgtttttctggtttgttcctgaaaaggcgggtatccataattaaaaaaaatttagaattatgttttcctgacagaaataaaatccagatagagagtatggtcgcaagtaatctatcatctttagggattgcattatttgaaaccggtattgcctggttctggaatgacaaaagaattaatgaaatatttagagtaacgggttgtgataactttaatgatgtatatgacagaaataatggtgttttaattattggtattcattccatgtcgctggaacttgggggcagagttatggggctgtgttttcctgtaaatgctatgtatcgtccccacaacaataaagcaatggagtatacacaaacaagatgccgaagccgttccggaagcgggatgatcgaccgtaagaatctgaagtttatggtatcggaactaaaacgcgggcaggctatttggtttgctccggatcaggactttggaactaaaggtactatcttcgccccttttttttcggtagctaatgcttctacatcaaaaggagtggcagctatagccaaattatcgaagtcgccgatacttactgcaacgatgataagaaataatgaaagtggtaagaggccttatgaattaataattggtaaagaaattgctgattttccgtgtggagatgacctggcagatgctgagaaactaaatcagattattgaggcagaaatcatgcatgctccggaccaatacttgtgggcacacagaaggtttaagaccagacctccgggagaaaattctctgtacaaataagttacaaagattgtcattgggtgccctatacccattacttatgagctgaaacctcacaatcgcagttatttatgtctgcaatttttgtttttgatatgatttccgttaactgcaaaacgggaactattatgaaaaaaatattgttgtgcctttttttgattcacacggatactgcatactcagcgaattgtgagctcgatactcaggattcggcattatgcgaggcggcaaatggtggtgacgctggtgcccaggttacaatcggatcttattactactacggtaatggtgctcccatagattataaaacggcggctgactggtatacaaaagctgcggtacagggtaatgagtacgcacaatattctctgggggagatgtattttcagggggagggagtgcaacaggattaccggcaggctattgagtggtttcataaatcaggtgagcagggaaatgctggtgctcagtttcgtcttggtgctatctatgaagacggtgatggagttaatccggactttttaaaagcggcagagtggtataagaaagcagctgaacagggaaatgcattttctcaataccagcttgcgaaaatgtattattacgggaagggaatagagcagaattaccgcgttgcagcggagtggtataagaaagcggccgatcaaaaatatgcatttgcactggcaaagttggcagagatgcatctctctggtgaaggcgttgaaaaaagccaaccaaaggccgagtcattgtatgatgaagcatgttttggtgggtttcagtcggcatgtgacagccttgcgaagctgaataaaaaaaaccagcactaattattttcaatcaaataatttttgtaagttcaggcaatttttacattcaggctaaatgtgtaaatatgcggtttgattgttaaaaattatattaaaggttattttcgtcgcctatctactaatgacggctaataaaaattatgtatttaattgaataatatgtgtttttacatcttagtctggtgtgtatcgataacttacaggtttaactcttctgagctgtttacatgttcggtcattctgaacagctaaatacttcggtatgatatggacagtattgagtgtcataattgtatatgaaaaagcccgctatggcgggcgatatgtattagcggacaaccaggacggatgtttctgcatagcggactacagctgatgcagtagacccaagtagatatttggttgaaatatttggtgatcttgagctgatgattattaaatcaacgtgtattttttctgcggtagtcaaaatcccatctatcggagtgtcaagaattgcatgataatgaacccgatcttccggaagattaaattttgaaacttcatttttaaggtcagcttctgctaactttaatcgttgattatcttctgtaatgatttctttttctatgccgtatgaaaggccgataaacattttgtagcttggtataacgactaaaaaatgtatgtgcgggtcatcaaactttgaaagagattcgatgtgagggatgacatggttaaccagtgctttattagaagtgtcaatcggtaccagaatattcttatacatacttttctctccggtttgcttttcactataaagtataggacattattgattatcggaggtaaattattgagtaacagggggcatctttagtagattgtctattaccctataaattcaaatgcctttttaactatttttatgctgtaaaatctgaggttggttgctggtcacgaagtgatttttgtaaagaaatgtaaatgagtcattgaaagtcaagatctcatccctatataaataacgcatcagggtaagttataccatgatgtgtatttaaaaagaataaattgaaatactgaaggaggaattatgcagaacattagttctttttcattatttccggcattatctgatagtttgctgtcaaatcgctttgaccagatggaccgtttattcagtcaacttacgggcaacaggccaataacctcagaacatccatataacctgaagcaattaaatgatgcgcactatcaactgacggttagtgttcccggatacagggaagatgatcttgaggtatcattgaaaggtggcaaacttagtattcagggtaaacaacctgcagaagtagttaatgaatcagagaaatgggtacaccaagggatattaaaaagccagttttcattagaatttaaccttggtaagaatgtcaaaattcggaatgcagaattatcctgcggattgctgacattggatatagagtatgaaattccggaagaagaaaaaccacagttgatagctattgaaaataaagatataaaggcttagtttctgattttttgttccaaacccgccaatattggcgggttttacaaggcctgaaaattacagtcctaacataatatataatgcaccgttgttaatagtattttgtggattaaaggtataactacggtgtaagcctcacttcggtgaggcttttttatttttccaacttgtaagaatggctttcatgttaggttttccgaagtttccgagggccgtatgtttggttattccgaataactggatacttgctgagagactctggtagcgcaggtcagttcggttgaactgaatcagtttcttatttcagatgcaaaaaaagccggtttgggaataaccggcataaggaataagcgacattattttatggaaatttcattacctttttattatagcgtaatagtatgtatttacacgtaatataattaaaaaagattaactatggtgagatgccttgttttgattatcactcagaatgatatgaagggactcgtttaccggtataggttttcatgctggcaatcttaaatttgctctgtctgtattaaatatagtgcaaatccggtggtaaggaagaaggtgatgtgatcggcggggtccggaacaaaactgaaagccgtactgaagcataaccgctggatattgggtgtcgggatggaagtggggtggtttgagcagactaaggtcgaaatcaacagtttttttaatttttaaaattcttgtcagggtgttatccatatttctgtgaataaaagaataacaggcggggtatatggattattttttgacgttaccgggcagcgatacttgttctgttctgcataaaaaggcatgtccgaaattacaacaggcaaaaagtacagtgtatgttggatactactggggagagcacgctgcggttcagcaggctatcgttgtggcaagaggggcagtggttttatgtccgttatgcataaaccagcatgatgaagagactcagtgataatcttacaggctcaactctccggagtttccggatagctcacatgttcggttattccgaacaactgattatcacgctgtaaaagtttggtgtggatgcgtagttagattaaataatcagtggtttttatatctatgataaataagtcaaatagctttgtttattgatttttctatagctctgcattcaggactgtttccgtcaacctggtctattttgcctggctggttcccttccggagtatccatttttattacgcatgcatcctgaccggtttggtgtttgatttttggtgagcaccccgtagctaaaagaaaaggtacgataattaataatgttccagccttatacatgtcagttaaccccatattgcaaactatcagagcctgatgctatcagagtaaaagggtgaaataaaaaatatttcataaatttcaaaggtcgccatgtgcggtcttttttattgcccgcaacaataagagcattggaatgcgacaggctcattacctaatccgtattcggtcacagtgcttttcttattgctttcccgccgctggtgggattatccgaaccatgccgcagccacttcattttaacctgtttaaaacatataactcggttgtggcattaccctatcactcaacatacggaacactccgcagggggtggatatgcgcatgtctgacaaatattccagccctacagcatatgcctgggggcttataacctctgcctttggcattttatctctggatcagtgggccattgttgccgggatcatctgtaccgtcggtacgttcctggttaactggtattacaaacggaaggaattccagttgaaagcaggtgaacatcatgaataagcgattggttaaaaaggtaatggccgcttgtgctgccggggcaattgccggtgcgctggtgctgatccccgcatatgaaggtgttgagtatatgccttatcgtgatgtggccggagtgctcaccgtatgttatggccataccggcagtgacattcagcctggcaagttgtatacggatgctgaatgtaaagcgctactgcatgacgacctgacgaaagtccggcgtgcggttgatcctatgattaaagtgccgattgatgacaatacccgggcggccatctattcatttgtctacaacgtcggccccggcgcgttctcgcgctccactatgctgcataaactcaacgccggtgatatcgccggtgcgtgtgacgaaatgaagcgctggacattttccggtggtaagcggtggcagggtctgattaaccggcgcgagacggagaaagcgatatgtcacggaaccccataatgctgatcatcaacgcgatcattcttcttacggcttgcctactggcgggctgttatctgtattcactcccgaatcactgtaagcctctgccgggtaacccgctggacggtgtgatccactatgagtgtgaagcgccatgaactggaaagaagcggtaattgctgcgctgtttattactgctgcctggtgggtatatgacacctaccgggataaccagcagctgaaggtgaataacataacgttgtccggacagctgtcagcacagcagacgataaataccatcacgctttcagccgttgccatcagacaccgcgcagcactcgacaatatcaaagccaaacaggttgaggatacagagcatgtcaacgttaagacagttatcaaaacagtatttaaggacagcgaatgcgctgctgctcctgttcccgctgatgctgtcagtgagttgcgcagatacgcgaccggaattaatacccgcgccggtggtgccgcttccgccgcaactgaccgctgattgtgagcagccggttattcctgatgaacttacttacggcgatgtaatcctgttgctggctgatgtcatgaagtcgatagctgactgtaatcacgataagcggtcaatacgggagatagaagcggagagaatgaagtaaaaaagccccccatgacgagggggtatatataaaagattcaggatatttttattgtgatcttcgggttgagtatatccccgataattccgtaattacaatatgcggaacaaataaaaaatgccctgtaagaacagggcaaataggcaattgataaagaatatttactctaacaacgatgctcaatatacaggcaattttgctggtaaatcaatagtaccattgctaaatggtggggctttttacgaatgtgattcattaagataaagtgaatcatatgtcaggcgtttatggtgttgggtaaagtattaccttacctgcaggaaatcagccatgcatccagccagaaccttcctatagatccgcttgtgtatcgatggtattgagacaagggtaatgactacagctgaatatcgaatagatcgtacaagcacattttttatgcgaaagtatctcattggttaataacttgatgaggttatgatgcagataaagtcagtttttatgtttttgggcatgtttctgcttaatggatgcagtgtcaaggtacccaaagatataaccccggttaaaccttttgatttatctcattacttaggtgactggtatgaaattgccaggatagataatcgttttgaaaaaggcttaagcaaagttacagctaactattctcttcgtgatgatggtggtgtgaaggttatcaacagggggtgggatgcgagtaacaataaatggaaagagagtaccggaaaggcctattttgttaaggaaggtgcgatttaatcagtcatgacgatccagagcctggatatcctccttacgcggcaaagtaagcaccccagtttggacaatatttaatctcccccatcaactcagggtaagcaaaatgtcactgctccactgatattacaatgattttcacgacatccccgccagttgtcccgcccgcaccaaattgcacattgcaaacagcattgaaagccggttgtggttcttcatcagtccccgtaatcgtgttttgctgaaaccaaactggcacttcagtatccggaaaggatgctcaacctttgccctaatacctgctttcacatattcatcatgcagcgcctgcttattcagccggggatgctgtctgagcttttttacggcatgaggacctttggcaataaaccactctttaacccgatgtgtcagagagtcccgtttttctgccccgcgatatccggcatcggcgaagacaattgctaccggctccgtaatcaggctatccgccgcattcaggtcatgcacatttgccgccgtggtcactactttttccgtcaagcctgtggccgcatcaacagcaatatgagctttcataccaaagtaccactgatttcccttgcgggtctgatgcatttcaggatcccgttgaccggctttattttttacggaacagggagcggaaataatggtcgcatcgataatgatgccctgacgtaacatcagtccggcctgcttcagtttctggttaatcagtgccagtatctgttctcctgcatgatgtttctccagaaaatggcggaaattcatgatggttgtgcgatctggcaccgtgtcacagatccccgcaaattgacggaacggcaggacatcatgcagggcgtcttcagccgctccgtcactgaggtcaaaccagagttgcaggcagtggatacggagcataagcaccagggggaaaggccgtcggccgcgacgggatgacggatagacgtgaagcagcttatcagcaatatcctgccacggcaccagaacattcatacggtcaagaaaacgggatttacgggaggaatagctggaaatggcaggcattgtaaacagctcatgataaagaaagctttatgttctcacatatgacgattaaatcgcaccttccttaactcagccgatacaggggcgttaaaggtatctttcttcggacctttctatggaggttacaatattattaagcttgatgatggctatcagtactcactggttgttggccccgataaagattacctgtgggtgttgtcacgtacaccagctatgccgccagagctgttaaatgagtatctcagctttgccggtgaacatggttttgacagagaaagaatacttatatttcaataagattatatttcggtttattccccgggatacggaatggactgaatattaaatatttcagcaaataaagcacaacaacccgcttcggcgggttttttattggggaaatctatgccattacgcatcccccgcgcctgccgcaaacgtggctgcgcaaagacaactaccgaccgcagcggatactgcgaagaacaccgtaatacaggctgggagaaccaccagcagggtaagagcagacaggaacgtggctatggcaccaaatgggacaggctgcggctggtggttctgagccgagataaatatctgtgccagcaatgcctgcgcgaaggccgggcaaccgaggcgaagacagtcgaccacatcacacccaaggctcatgggggaaccgatgcggaaagcaatctgcaaagcttgtgctggccgtgccactaccgcaagacggcaacagaacgcaatcgcggctgactgctcatgatgcatgggggagggggaggtcaaatccctgcagctttatctatccgggaccgccgccttgcctcttttcagatcgccgcaggttagaaaacttttttccgggatccccggatgggaatcaataggagaaaacgattatgtcgggaccaccgaaaaccccgtcacacctgcgtttggtcaggggtaacccatcaaaacgcccgatcaataaaaaagaaccaaaaccgccgtcaggggtacccccaactccgaagcattttaccaagcaggggaaatactggtttaagcggatcggggaagaactcgatgccatgggcgtgatgagttcgatggatgccaaagcgctggagctgctgatcgaggcatacaccgaataccggcagcactgcgacaccctggacgaagaaggttacacctacacaacacagagtgatggcggaccactgataaaagcacacccggtggcggcaatgaaagccgatgcctggaaacggatccgggcaatgctgggtgaatttggtatgaccccggcgtcccgctcgaaggtaacgattaacacaccagccgaagaagaccctttcgaggcatttatgaaaaagcgcaaatgatgaatggcaaccgtagcagatgggatccggtacgccgagcaggtggttgccggagaaatagttacgggcgaactgatacgcctggcgtgtcagcgggttcttgatgatttagagcgtggccctgagcgcgacatctttttcattgaagaacgcgcccagcatattctggatttttaccagtttgtcccgcacgtcaaaggggcgctggcaggtaagccgatagagctgatgccgtggcatacctttattctgattaatatctttggctttgtgatcccgctggttgatgaactcagcggagaagctcagcacgacgatgacggcgatccggtactggttcgccgtttccgtactgcctataacgaagtggcgcgtaaaaacgccaaatccaccctttcatccggtatcggtctgtacatgaccggcgctgacggtgagggtggcgccgaggtttactcggcggccaccacccgtgaccaggcccgtattgtgtttgaagatgcaaaaaacatggtcaaaaaggccaggagctcactctgccgcctgtttgaatttaataagctggcgatttaccaggagcggtctgcatccaagtttgagccgctgtccagtgacgcaaataacctcgacggcctgaatattcactgcggcattgtggacgaacttcatgcccacaaaacccgtgatgtgtgggatgtgctggaaaccgcgaccggtgcccgtctgcaatccctgctgtttgcgatcaccacggcggggtttaaccgcgagggcatctgctacgaactgcgggattacgccatcaaggtgctgcggggcgtggtggaggatgacacctttttcgcggcaatttacacaccggatgaggatgatgacccgttcgatgaaagcatctggataaaagccaatccggggctgggggtctgtaagcgttttgacgatatgcgccgcctggcgaaaaaggcaaaagagcagattgcggcccggcctaatttcctgaccaagcacctcaatatgtgggtgaatgccgaatccgcctggatggataccggtaagtgggacagctgccctgaaaatgcgccggatgatgagctgaaaaattacccggtctgggttggtgtggatctgtcaaacaaaatcgatgtgaccgcagccgttaaagtgtatgaggatccgcgcggacaactgcatatgaagtgcaaattctggctgccggaggacagagtggtgactgcaccgaagcatatcgctgacctgtaccggaaatggggagctgccggtcatcttgaactgacggacggtgaggttgtcgatcacgacatcatcaaagccgacattctggcatggtgcgaaggtgaggatttacgtgaactcggttttgacccgtggagtgccgttcagttctcccgccgcctggcggaagaaggtattccgctggtggaggtggcgcagacggtgaaaaacctgtctgaatcgatgaaaaccgttcaggctgatgtatattccggcaaatttcatcatgaccacaacccggtaatgtcctggatgatgtctaacgtgacggtaaaaccggacagaaatgacaacattttcccgaacaaatcgacaccggaaaacaaaattgacgggccgtttgccctgtttactgccaaatcacgccagatggtgaacggcggggaacaggaacaaagtttgtccgatgttttatcttccaggggcttacgttcactctgaggaaatccaatgaaattactgactattaccgccctgctggtgggggttgcgggtgggaagaactcgatgccatgggcgtgatgagttcgatggatgccaaagcgctggagctgctttcacctggtgtccccgtgttaatcccacggaggacatcacctataaaacccgcagggcgaagttcggtgatggttatgagcaggtgtccggtgacggtcttaatccccgcagccagaagtggtcactggaatttaccggccgcggggagtatatcgcggctatccgtcagtttatcgaccgtcacggcggtataaaggcttttcagtggaaacctccgcttgagccggtcggtctgtaccggtgcgacgagcataagctcaccccgctcggtggtgacaactattcactttctctcacttttactcaggcatttaaaccatgatcacaaatgactaccagaagctggaaccgggtaatgccgtccggctttttgaggttgacagtaccgcattcggtgcgccggatattttgcggttccatgcatacaacatcccacatacagaggcagaaattactgccgccggtggtgatcagaaaaaattaccggcgaaatccatctggtggcagggtgaagagtaccgtgcgtggccggtgctgattgacgggatagaggcgtcgaccaccggatccggcgcgcagccgaagttatcagtggcaaacctcgatggttcagtcactgcgctgtgtctggcatacgatgacatgctgaaagcgaaagtcacgatacacgataccctggcgcattatctggatgcagcaaactttccggatggtaacccgtcggcagatcctacccaggaaaaagtctcggtcttttatatcgacagcaaatcctcggaaaccaatgaggttatcgagtttgatttagccagtccgatggatttgcagggggtactgatcccgacgcggcaactgcatgcaatgtgtacctggtgcatacgtggcaaatacaaatccggtgacggctgtgattatgccgggcagaacgggtattttgacaaacacggcaaccgcgtggatgacccggcacaggatcagtgcagcggcatgctgaataccggttgctttccccgtttcgggaaaaataatccgatcccgttcggcggctttccgggaacctcattgctgaggaaataacgatgcgtaaaaacattcaggcggccatttttgcacacgcagaacgtgaatacccccgcgagtgctgcggggtgatcgcgcaaaaatcccgggtggtgaaatactttccctgccgtaatatcgcggccacaccggaagagcattttgtattatcgccggaggattacgctgctgctgaggattgggggacggtgaccggtattgtgcacagtcacccggatgctaccactcagccgtcagaactggataaagcacagtgtgacgcccttggcgtgccgtggtacatcgtcagctggccggagggggatctgcggactgttcagccgcgcggcgaactgccattacttggtcggccgtttgtgctcgggtttacagattgctgggggctggtcatgagctggttccggcaggaacacggcattgaactgccggattaccgggtggattatccctggtgggagcagggtgagaaccgttacgccgataactggcgggaagcggggtttattcaggtcgatgatccgcagcccggtgatgtcatcgtgatgcaggtgcaggcaccggtcgccaatcatgccggtattctgctggatgataatatgctgcttcatcatttgtacggacacctgagccagcggatgccgtatggcggttattggcgtgatcgtacagtgatggtactgcatcatgagcaactgatatgacccgctccggcgggtttttttacggggcaaatatgtcacaggaaattatggtgaaaattatactcggtggtgtgctgggtaaaaccttcggcaaaacacatcagcgcctggtcagcacaacctccgaagcggtccgtgctttatgttgcacaattcccgggtttgaacgctatctgaataccagtaaatcccgcggcttaacgtacgcggtatttcgcgggaaaaagaatatcggggtggacgacctcagttttccggtgacggatgatgttatccggattgtgcctgttgtgatcggcagcaaacgcgggggattgctgcaggttattttcggcgcggtgatggtggcagctgcgttctggacaggcggtgcgtcagtggcggcatggggagcgatgcataccgggttggccatgaccggcgtatccatgattttgggcggcattatccagatgctgtccccgcagccgggcgggcttgccatgaaagaccagggcgaaaacaaaccgtcctatgcgttcggcgcaccgacgaacaccgtttctcagggttatccggtaccgatcggttacggtaaacgccgcatcggcggagccgttatctcagccggtatttacgtcgaagatcagcagtaatcctttctccgtttttcagcaggaaattcataatgacacaaatcacaggccgcaaaggcggcggtggcagcccacgcacgcccgtcgaacagccggacgatttacagtcagttgccaaagcaaaattactgatcgccctcggtgagggggaatttgccggtgaactgaccgggaaggctatttttctggacggtaccccgctgctgaatgctgacggttctgaaaacttcccgggcgtggtgtgggaataccgtcccggcacccaggcacaaacctacattcaggggatgccggcggcggagaatgaaatcaccatcggtaccaccgtgcagagcagcacaccgtgggcgcatgcgtttactaacccgcagttgtccgcggtccgcgtccgcctgaaatggccgtccctgttccgtcaggaggataacggggatatggtcggtaacgaagtgaaatatgtcattgatttgcagactgatggcggtacctggaaaaccgttgtggacggccgggttaagggtaaaaccacctcaggttatgagcggactcatcgtattgatctgccgcagtcggccacatcctggacacttcgggtgcggaaaatcactgaagatgccaacagtgcaaaaatcggcgacaccatggtgctgcagagttacaccgaggtgattgatgccaaactgacctatccgcacaccgcactgctttatatcgagtttgactcaaaacagtttaacggctccatcccgcaggtcacctgtgagccgaagatgcgggttatccgtataccgtcgaactatgatccggaacaacggacgtattccggtacctgggatggttcgtttaagtgggcgtggaccaataaccccgcctggatcttttacgatatcgtggtttccgatcgcttcggcctcggcgaccgcatcaaaatgcagaatatcgataaatgggaactgtaccgtgttgcaaagtactgtgaccagccggtgccggatggtaagggcggcagcggcactgaaccgcgctatatctgtgatgtgtatgtgcaggatcgcaatgaagcctataccgtactgcgtgattttgcggccatcttccgtggcatgacctactggggcggcaaccagattatcaccctggcggatatgccgcgtgacattgattacagctacaccaaagccaacgtgctcgacgggcgtttcacctattccggcagcagcagtaaggcccgttattcctccgcgctggtgtcgtactccgatccgctgaacggctatgccgatgcgatggagccggtgtttgaaaatgagttggtttaccggttcggctttaatcagctggaaatgacggcaatcggctgtacccggcagtcagaggccaatcgcaaaggccgctggggcattctcaccaataacaaagaccgggtagtgacattcggtgtggggctggacggtaatatcccgcagccgggctacatcattgctgtggcggatgaaaatctgtccgggaaagtgaccggtggccgcgtcagtgcggtgaatggccggagtatcacacttgaccgcaaaccggatgccgcgcctggtgaccggctgatgctgaatctgccatccggcaaatcacaggcccgcactattcagatggtcacagataacgtgatcactgttaccacggaatacagtgaaacgccggagccggaatgtgtctgggtaacagaatcagacgagctgtatgcccagcagtaccgggtggtgagcgtgattgaaaatgatgatggcacattcacgatatccgctgccatgcatgatccggacaaatacgaccatatagacaccggcgcggtactcgatgaacgtccggtcagtgttattccgcccggcaaccagttcccgccgaaagatatcatcattaactcttattctgtcgttaaccaggggatcagcattgaaaccatgcaggttacctggtcaccggcggagaatgccattgcctatgaggcgcagtggcggcgcgatgacggcaactggatcaatgtgccgcgcaatgccaccacttcgtttgacgtgcccggggtgtattcaggccgctatctggtgcgggtcagggcaatcaacgcagcggaaatctccagcggctgggggtattcagaggaaacccggctgaccggcaaggcgggagatccgccagtgccggtgaatttccgtgcgtccacactggtattcgggatcaaactgaactgggaattcgggaaattcaccgaagacaccctgaaaaccgaaattcagtacagcaaaaccaacgatggccagaatctgttgctactggctgatgtgccgtacccgtcccgctctcacgaactggccggtctggccgccggtaccgcgttttatttccgcgcccgcctggtggacaaaagtggtaattattcagcatggaccgattatgtcagggggatctctgaatttgatgcaggagaaatactggctgatttgtcagggaagataggtcatgaccaattagcacaggacctgctgaccgaaatcaacagtaaagcggacagcagtgtggtcagtgctctggacgaacgtatgtcggatattggcggggaggtgactgaggcaacttctcaggtacaggcgttgtccggtaaactggacaaagtaaaggctgatttaacagagtcagtcgttgttgatctggatctgtcagcattagatgaaagtacttattacccggttattctccctctgacgacctcccgtcgctattacttcagggtatttcgtacgctggggcaatacggagataacaaacccggttatgcaactcacggctccggcggttttgccatgattgttgagtggcaggtgagcggttcaggatgggggactcagtctgaaaaccgtattattaataatgttgactggcgatggacaaatcagtctcctgtcatgggccctgcgcagttgactcacagctcagtggaatatgtgtatttacgcggaggcgcaaaatatcagctgaccaggcataaaagtgtcagtcaccggattgtcactgatacttacacaggtaacgggcaatctgttacaccaaaaggttttgttgccggtgaaataccggtgtccggtgaacagcggtttaatgccacagcaaacgcagtgaaccggcttgaaacgagtgtgacagaggtttcaggaagggtcacatcaacggctcagcaggtgacacgtctggaaagtcaggtcggggcggattcggcaaaaattgaacaaacgtcaaaggttcttactgacttaaacggcaggatttctgcatcgtggacaatgaaagtccagctggacagcaaagggaataaggtcattacaggtatcggactggggtttaatgctcagggaaacagtcagtttcttgttaatgctcaaaattttgccgtgatatcgtcactgaacgggaaagtagtaaccccttttgttattcagaacggccaggcattttttaacgatgcgctaatcagccaggcaacaattgataagttactggtcggtaaccacatcagatcagtgaattatgaaacaggccggaacgggtattttctgaatgcgcagaccggaaatgcagaatttaacaacggagtgttcagagggaccctggacggtgtggacggtcgttttacagggacggtatatgcggagagactggtcggggatgttgcagtggctgcttcatatcctcacgcctcggcacaaaatatccatagtggtcgtggcgggtggacaacggcaacgtctgtaattacgtatgcaggcggaatgccttatgacatgacgttggtactcccttcgataactgccattattgaggatgatacgggggggcgtccacgtccggttgagggagaactgcggttcagtatacgtgtggatggagttggtcagcaggcaacttctcagtggtcaggactgagtgttatgggatcagctcatgcggttattcctcgtggacgaaagaatgtgaaaatagaaattgaagtgggagtcaggcataaaggcagggcacatgtggttctgagggaaggggttgtgatggccttcaaacgcagttccgcatcattcagatagcggggacggagaaagctcagggtaaactgcgccggtggttaccggcgcggtccgtgactgtattctgtcaggacgttatgctatgcgatctactggaatccaacccgcctcgatgtacgtgttgaaatgccgcagagctcagtgtggaatgtgaagcagcgaacagatggaccgtgagcaggcagagcgtgacgcacgggaagcggcagagcaggccggagacacagaggaataaaacaaagccgcgctggcggatgtccggctcggcaatttttattgcgttggcccaaatgtaacctgacataactggagcataaagccaaatctaatcttacagaccgctctgtgccaacaatagatatagtttatatccttcgtgagccagtttatagagatcagatcaatgcatctgttcaatgcaaagaagaagtcccggtatttccggaaagaaataccgggagtctgttgttacctggcgatcagcgcgaacacgccccagccaaagtattcacgcgcgtaggtcacgtgacgttttggcgagaccgttagctcagccctgacttctgccgcgaagtcgtcgttagggttcgcttccagccagcggcgcatggtcagccatttcgcggcttcatacctgtcccagccttcctggtctgccagcaccatttccaccacgtcgtagccgaggtagtcgaacgcactgataagttcaggcaacatcaggagatcagctattgcgctgacgccgcatgcctgagctatctcttctgttgagggtagctgacgccagtagggttccccgataagcatgatcccgcccagcttaaggctctgcgccagcagctccatcatcccggcaaatccaccggcaatccatgtcgcacctacgcaggcggccacatcgaatttctcttctgccacatacccagcggcatcattatgtatgaactggacccgatcactgacaccaagttcttccgcgcgccgtctggcctgcttgctgaacaactggctcatgtcgataccgactccggtaatcgcatgatcccgcgcccaggtacagagcatttcccctgagccgctgccgaggtcaagaatgcgggtctccggcttcatgcgtagcacacggcccagtgtggtgtacttctcttcggtgaacgggttgtggatgcggtgttcgctttcactgatggtaaaaatacgtgggatatccaatgctgaattccttttattgcgttgagtattaagaggaagctcccctgaggtttttgctttttcagccaacagagcaaacagcttcccttcaaatgtctcgctgactggccagtcgtggcctgcagggggaggcagcagggtaaatccggtattattgagcaggctgacgtactcttcatcgcgccaggccgtcatttggctgccgaaacgagtggtgtgaccgtttgcctctatggcccagaactgcgttgagctggtctgttcttctttatcccagctatgttccgtcagcagcagatgagggacgcccagaaaaagtccatccggacagcgttgccagctcgcttcagccattccctgacgcttaacttcttcgaaagtatggacttcagtgagcagcctgccacccaactccagccacagcgcgcaccggctgactagtaagcgtgcatccgcagtgctgaacacattcagttccccgaacgtcatcatgatgaaatcgaatgacctatccggccagtatgcacggatatcctgctgaatatagttgatgttcaaattggcattttgcgcctgctggcgggcccagctcacagatgctggtgagaaatccacgccggtgcagcgaaatccgcgctccgctaagcggtgggtataaaagccgggaccgcagccgagatcgaggatgtgcgcgccaggggataactggctggcgatccactctacctgctgctcaatgatctcctgcctgcggctggcccagtcgtgatcctgcgacaagtggttcgccagcatgcgctggctgaatgctggttcatcccagggaattttgctttcatccgctgaaagccggtcatatcgggatgcgtaaataagggtattaatatccatcatgcctccttagcggttatcaagctgtgcgcgaacgttattcagcccggtagtgttgatgcggtacggctgaccgttaacggacttgataagttttttggttttgagttttttgaaggtggcaagggtgcagtcggtaagcaacagcccttcgcgggtgtagcattcaacggcgatgaggcggccagacgtatctcggacttgcgcgatacgaccacctttagcgagaacgtgtaaggtacgttgttcctgacgggataaattcatactggaaaacctgtttaatcatcatgtgcaaaacgtgcaaacacatagcggtgtccgcattcgatttcggcgcattgataatcagttcgacctgaaaaggtcggtaagctgattatcggatgattacattctccagcatcaaagcctcgggttagttgaaaggtatttacggaacaaatggtaacacacaatttaaatatgggtatgtatcatacgataaagtgtgatttgtttcataaagctcccttttttaactttggcctgctccccattgattcacacagaatgctgttagcaatattcgttcttcgcttatagcggactgccggatttgatttcaacgagtaaaatatgtgacgcataagattagtaaaaatcagattgatgagacagtcaaatttctctatcattagctgtatatatatacagttaatcggttctgagtatgaaacttgtcaagatcaacgatgatacaattctgacattgcctctgttcttggagcatgtccccgctgggttcccgtcaccggcggcggactatatcgaggaacgcataaacctgaacagtgaactgatccgacacccggaaagtacctatttactcagggttgaaggtagctcgatgatagatgcgaatatctttgacggtgatgtggttatcgtggacagcgcggtaactgcggcggagggggatattgtgattgccagttttgacggagagtttactgtcaaaaaattgcaattgtcaccggtacctatgctgatcccgatgaatccggattatcagcctatcgtaatcagcagtgagcaggatttacagattttcggtgtggtcacctacatcatccatcgggcgcagtgatgtttgcgctggtggatgtaaacagcttttacactagctgtgaaagagtattccggcccgatctgacaggtaagccggttatcgtcctgagcaataatgatggctgcgtgatcgccaggtcagcagaggcgaaaaccctcggtatcaaaatgggggcgctgtattatgagtgtcgcgatttttgtcataaaaacaatgtgacagtattcagctcaaattatgcgttgtacggtgatatgagcagccgtgtgatgacattgctctcatccttcgcacccgccacagaaatctattctatagacgaagcctttctcgattttaccggcatgaccaggatattcagcccggaagattacggctgtgagatacaggctgctattctgcagaaaacacaccttccggtcggtgttggcattgcaccgacaaagacactcgcaaaacttgccaaccatgcagcaaaaacatggaaaaaaaccggcggagtggtcgacctttctgataggctgcgccagcgtaagttactggcactgataccggtcagtgaagtgtggggtatcggtcggcgaatatcggccagactgaacaccatggggattcgcactgcattagatttggcgaacgccgcaccggcgactatccgtaaaactttcggtgttattactgagcgtacgctgcgggaactgaacggagaaccctgcatcaagctggaagaagtcagaaaggtgaaacagcagatcctctgctcccgatcattcggtaccaaagtgacggacattgttaccatgagaaaggctgtgtgtgaatatgccgaacggtcagcggaaaaactccgggaagaaaaacagcgctgccggatgatcggactgtttgtacagaccagcagacacgctaacgggccggattatgcgaacagtgcaaacatttcgctcgagtatcccagctgcgacacgcgggacatcatcaatgccgccatgagagcactggatagtatctggtgtgacgggtatcggtatcataaggctggcatcatcttgtcagacttcactgattcaaccgtcacccagttcgatatgttcgccacccggaagccgttcaaaaacagtgatgagctgatgaagactatggacacaataaacaacagtgggctgggccgtgtgtggtttgccggtaaaggcagcgatagcgggtacaagatgaagcgcgaaatgctgtcaccggcatacacaacaaactttagtcagttaccggtggtgaaaagttaatgtggcaccagtgagataaagagttgttgcaaatatgcagtttgtttaaaagatgggtgtatagctgttggtaggagtggtgggacatatttgggacacaaatggttttagatgtgctttataccttttcaatctttttaattgttgggacgtgaaagcgtgacttaatgcggtatctaattgattaaaaaacaaaactactgacttgtaatcagtaggtcaccagttcgactccggtagccggcaccatattaaagcccgcgatatctttgatatcgcgggcttttcttgttgccgcctacctcaaatgttcacaccgttttgctttcctttgcaccacctgacgattaacattagggaaactgattattggagtagtgtgatggctaatttgaaaataactgttgtctgtttagtggcattatctcccttattattcttgtctgatgctttggctaaaaattgcaagaaaggaattccctgcggcaactcatgtatatcagcaaacaaagtttgcaggataggaacagcaaacagttacagcacaaagaattatagtaataaatccatatcaactaatagtaaaaaatctctgcacggctcaacagtggcagcaacaggcggagtaagcgcggcatcattggctggcaggtcttctggcagtggcggttcaatcggttctggtgttgcttataattgtatttattctaaggctgtgatcgttggtgatgccatgggccctatgcaaggccgatttcactccacggtatcattgagcaactcagcattcactgcgttcaggcctgacggcagtaaaatctccagtccgaagatgaaaacaaaaaagaatggttattactttgagcaggatgataaaactgtttatgtcatgtcagtggattataaagaatacgctgtttcagatttcaaaactaaaaccactgagcaatgggccgagtgccagtgatagtgaaataatattgtgatattgtcatgtgaatttatgaatactaaataactattgatggtgtatcggctgtttgtggctgaaaaatgcagagttatcatttaaatatatccgaaacccttgcaagatatttatcttcataaaacggtgaaatggagttttttatcacggtatgatttatttctgtttccccggaaacgattttattcagaatgtcagcgagttttttattatctccgacaggatataattcaccatttacatacggacgaataatatctgcaggtcctgtcggacagtctgaactgacagtataaataccatagctgtttgcctcacacagcaccatcggcaatccttcgtatgcggatgttaaaataagcgcagagacattttttatttcttgttctatgtaattccacgggcttgattgccagccatgccagatgattttatcgtctattttcagatcgtgagccaggctggttaatttttttatttcggagtcatcgccggagccgacgatatgtaatttccagtcaccatgaacaccggataatgcgctgaacaactccctcatgtttttttgtcctccgcacattaagcgaccgacatataaaaaatttatcgcattgccacagctgattgttccagattgttccggaaccgggttgtagatcgtataaatatccgcagggttgatacccatttctgataactgagttgctataccactactgatagacaggtgtttatccgtcagcctgatatatttggctttatatgagccggtgacagagaaatgattccacgagaacaatggaattcttttaaatgcgaagcgcaaagccagtcttgaaatgtaacagccaacagaatcaaaggcaatgacataatccggatttatttttttaataacagaagcgaattgacaggcaaaataaactctcttcagcttcccgttttttagtgatgaactgaagcgtgtaaatgggttattaccgagccacgtatcgtcaacactattattcagttcattaaaaaagacgaaagatatctgatagtttttcccggattcagtcagtaatctgctgaatgtactgaatacggtttccatgcctccaaaaccgctgatgttacgaccggcaatgatgattttggttatgtcagacatgctgtctctttcccgtgaactgaggtggtacagacaatttaacataagtatcattacttaccaaaactaatcggcagcttgatttttttaggtagtcattatgataaggtatccatgcttaaaaataaatcatacggatattatctgtgacctgacctgcgttaaatgtgatttctcctgtggcacaataacggagagttaagggataacagccgctgatgtctggtttttatctttgtaagctgtcaccgggaaacagaaggtctggtatgaaaagagtggtgtttatatcctgtttgctattttcatctgcgtcttttgcagtcagctttgattgcagtaaagcacagagtaaaacagaaaaactggtgtgcgatagtccgtcattatctcaggcagatgatgaattatatgcagattacctgcaggcaaaaaaaatcaccggaaacagtgatgagtttagaaaaattgtcagagaaaaccggaaactgagattacagaattgtgatacagaagcatgccagctggaatggtataaaaaatcatctgtgctgttccggaatattgctgacagtaaaaatccggcgtcagcgcagatatgctacgaggacgggcagcaggtgacattaaccggtacgctgaaacgtgttgtatttccggggccgccaaattatgaaagcgtggaagagggtgatgaaccggaaccgtattgggttctttttaccaaagaaccattgacctgtataaaagacagtccggactggggcagtaatgaccagtttcagttgatagtaagaggcgatttttacagcaaaaatcagcattatcttaatcagcaggtctctgttaccggcgaaatgttttatgccgaaaccgggcatcaccatacaccggtactaatcgatgtgacggcaataaaaggcgtgaaggttatttcaccgtcagataaccactaattctgtgtttcactgatagttgctccggatattcacaaggctaatctccctgttatttccggaacagattaacatcatccataaaaacactgtatatttatccagcctcctctcgggcgggctttttctgtcagtgtcccggcgacctgagcgggcactgaagagtagctgataccgggaaataaatacggatactatacaggtgaatattatgagcagagacattcagacgatactgttgcactggggcggttgggcagcgggtggtcactgtgcgggcatgggctgggcccgtgtttcatccggattccgggaacttgctcagaacagcagtaaacagagaccctcatgcagcgatgaggatggccgggttatcgatcgttgtgtatccatgctggggacggccggtctggaacgtgaacgcgactatattacggattattacgtgaaagggatgagcaagcgggcgatcgggcgtaaatataaagtccgcgaggatgaaatccgtaaacaggtacagagcgcggaaagctttatttttggttgtctggaaacactggcagtgcaactggatatggatagtttatataaagcctatcctgatgtccggagcacattggtgcggccgcaaacggcatgctaatctgtaaaaaataacgaattacatattgaaaggcattcagattctgagtgcctttttgtcgttatggcgggatgtttttccgcactccggagcacattagtgcggccgcaaacagcatgctaatctgtaaaaaatgacgaattgcatcttacggtgaaggatatgccgcgcaaaagtcgtcgccggtttctttcagttcagtcagttcataagccatgacgtctttgttatctttaacggtatgatagcgggatttgagttttactatcaatgaatccggaacaacatcattgtcatcaggatcacgctttgcacaataaaaataaaacatcgctttttgcagcacagaaaccggtaatacatcgtaatggccggataaatactgaataacatactcacggtgtttatctgatgacagcagtaaatattccatacattgggatttaaaataatcattactgattaccggcgattccattatttttttccggaattcacaggataaatcagggccacgtacagaaagcgcatccagataaaaacccgcttcttctgcaccctcgtcttcacaatcccagttgaaatataacgggttgatataaccttgtttcaggtacagcgctaaaccatcagccaattcctgtgttgatttactgttgtaatcgttatccatgatgccggttccggttttatggtatatggcggataccattaatatacggtttcctgacggaaattaaatcattatttatctgtcattatatcactgcaccgaaatacagtgtgttcagccctgcctgtgagcagggcttttttatggccggacaggaggcagagagtattcacaggcactgaggtaagaatgaatgataaagacattgaattaattatttataaccagctggttactgagctgaaaaatcacggtattaccacgggcgttaaggcgggtttctttccggaaaatcatatctccggagaggattttattgccttttatcctgttggtgagacaccggcaggatggcagaaacgcagttatgccgtccgcgggcagaatgccaatcataccgaaagccagataactgaaaaaaaataccgggttcaggggtttattactgaatctcagacacataccgccggtgatattgtggccgcagtcaggatgattgtgaattcactgccctttaccggtgtgctgaataaacagggagtcggcgttcagcgcgccggtgctatccgggtgccgtatctggctgatgaccaggggcattacagacaggcaccttcttttgatttcaatgtgacgtttacccgtacactccgcccggagaccggcgttgtttcagcgctgttcccggatatttactgcatataaggttttactatgccaattaaacaaacacgctatgtcgatatcgcctctgcggtcatcggcgcttctgctgtgcctgagcgtaagctgaccgcacggttattctctgctgatccgaaaattccggccggtcatgtccttgagtttgcgccgggtcaggttgatgaactgctgggggcggattcaccggaagctcagtttgcccgtcagtatttcagttatgtcagtccggcaccggtcagtaaaccgaaagaactgcagattgccgcatacgcgccggtcgggcgcacaccggcactgttcggcgttaaagcggctgcattggctgatctgactgccgtcaccgacggcacactgtccgtaaccatcggtcagaccaccaaaaactataaggatctggatttagcggcggccaaatcctatgccgatattgcctcactgatccaggcaaaactgaatgctgagagtgagccgcagttcgcgggcagttatctcacttttaatgcacaaaagaatgcgttcgaactgaacggcggtgtacaggagcatgtctccgccggtgtggcgtattccgttctcgcggatgccatgggactttcttccgggctgtcatcagaagggcatccggcgcagacaccactggaagcttttatggtggcagagcaggtatctgactcattcggcagtgtgacgttcctcactgaattaccggcggagcaggctgtgccgctggcgcagtatgtcgccggtgagaatgtgaaatatcagctgcatctcagtgtgtctgccgacaatgcagaggaattaaattccgcgctggcaggaacggcatctgttggtctgaacctgaaaacggacaatggttactttatccaggcgctgccgatggcagtgatggcagcgaccgattatgaccggacgaatgctgcgacaaactacatgttccgtcagctgggtgtgaccttcccggcacaggtgaccaaagacgcggatgcggatcgcttcgacaagctgcgcgtgaactattacggcgaaacggcggtggccggctcgcaaatccgtttttatcagcgcggcttcctgtgcggcggagcatctgatccgctggatatgagtgttcacgccaacgagcagtggctgaaagcgtatatcgcacagcagtggttcagccttctgttggccacccgcggtgttccggccaacaaagacggtgaggcacaggcgctgatggtgattgccggtgcagttaccaaagcgctggataacggcactattctggccggtaagaacctgacagaagtacagaaaatcgcagtggcagatgcctccggtgatgatctggcctggcacgatgtgcaggacaaaggttactggtatgacgcgaaaatcaccgaaaacaccggcaaaaacggtctgccggagtatgtcatgaaatacgtgctgatttacggcaaaggcgactgggtccgtaaagtcgaaggctcacataacttagtgtaagtaaggaagaaaaatatgattgaagtatcagcaaccggtctcgcgctggtggtgaaagccagcaaaacctttccgtcaggtattcttatcaccgcctttgcggatgatgcggatccgctggatctcccgccgaccgagattgttaaaacaggcgtcgatatcaacggtaacctgctgagctggtcagcaccggcaccgcagacggtcacaattaacgtgccggcgggcagtgaggaagatcagaacctggctatcctgctggacgccaatacggcgaaaagaggccgccgcgccgctggggataatatcacgatggttgcctcttacggcaacggttcgaccaccaccgcacgtaacggccgtatcaccaacggcagccgcggaagctctgtcgccggtgcgggccgtctgaaatccaaacagtacacatttgtattccaggattttgattttacacgtaatcgttaattctgagcgggcgaaagcccgctttttttacgggaaaaaatatgctgatcaaacctaaagaagtggcggtaaaagatgccgatggtgttgagaaaacattcattatcagccgtcttccggcaattaccgggcgggaaattctcgccaaatatccgctgtccaatgcgccgaaaatcggtgactacgaagtcagtaaagatgccatgctgaaaatgatggtctatgtgtgtgtgccggtcagtggtgaagagatcccgctgaagacacaggctctgattgataaccatgtgccggacggggaatcgctgatccgccttgagctggaaatgctgaagtacaacaccagttttttcggcaaaggcgggagccggggtttcctcccctccctgctcagcagggcaggcagttcactcccgtcggttataaaaacgctgatagcttctttgcagtcatcatcagcgaaaaactcgccaccctcagcgaactcaaaacctcagtagatctggaggaggcactggatctgtgggaaatcgccattaccaacagatataacgaagcgctggccgctttaaaggatagataatgtctctgacggaaacctttgttcagttaattgaatctgatatcagtcagacaaacggcgcacttgataatctccggcgttccacggatgacatcgttgacgatataaaacaggcgcagcaaaacacgctgacgttcggcagcctgctgaaagagatgtggccgtggcaggagcaggtaagcggcggacagtatattgagtttgagagtaatgccggggaagtgacaaaacagaccggtgaaatgagtacgaaactgagtgccattgtgacctcgctggtacagtttaccggcggggaatctgacgctgtatttaaggcgctgaagcagaattatgatgacctgcagaacagcatctctgaaacccggcgcaccggcgaggcggcagcggcggcagaaataagtgcccagaaaaaagtacagagcgctctccgtgattcggatgccgcctggcaaagtgcatttgataacgttgcggcactggcggaaaaatcccttaatttcgccggtatttcaacgacaatcaccggacttatcagtgatgcgacagcccgcgccgctgaaattgaatccattgataaactgggcagagaaatcaatatcaccacgcaggatgtggatgcgttttccggctcggtcgctgctctcggcggaacccgcagtgccgcacaggccgatttatccgcgatggcaaaatcattcggttttgccggggattcgatggaaaaggtgttacagactgcggataaagtgcagggcatgtcattcagtgaggccaaaaagacactcggcggactgggtgttgaggataacggcactgttgagatgctgatgaaagggcgggaagagttatcccggatgatggaaacacagaaagactatggcggtatcacccgcgagagtattgagcaatccatcagttttaacaatgccatgctgagcctggaacaatccgccggtctcctgaaaaacagtctgatgggtatgctgatcccggcgctggctcaggggctggactggctggaaaaaatcgttgtttttgcgaaagaaaacaaaaattttgtcaccggcttttttatcgcggtggccaccgtcgtgacaggcaaatatgttcacgctatgaaactggcacagatcagtacatggaccgccatgctgccggttatggcggtggtggcggggatccttctgctggcggcggtttttgcgctggtgtatgacgacatcatgaatttcatcgacggtaacgactcgatgatcggacggatactcgacagctatccgggactgaaagcggtcattctcacggtgtgggaggcgtttgtcgtcctgtttgacttcattatgtcggtgattggcgttgtggcggatattgtcgtcgcggcttacaacaccatgaacacggcactcaatgagtttattgactggctgactgccagtattcagggggtgatggcctggggcgctgaatttgaagcggtctttgataccgtgtcagatgcggttgttggtatcttcacatggctgtgggagcagattgaggagatcctcggctggatcagtaaagggatggatctggtcaaagagggctggagtacagtgaaaggctgggtcggtatgggggattcggcagagattgaacagaacgttaaccgtaccgtgaccacgaagggcaaactggagtacagcatcccggaaaccccgtctctcagtgaagaggaaacactgaaacttgccggacaaatcaccggccatgtcaccacgctggcggctaacccgatggcatccctgaccagcggaacgatcagtaatcagtctgcggtcagcaatgaaaatattatctctgtcggtgaggtcagtatcgttgccaaagacggtgatccgcagactattgcggcggatatcgttgaggtgctgcggcagcacatcgaaaatatgggacatgaatataattcggggatggagaaatgataacagaagtcaaaatctttgatgtgaactcatttgccacgctgtttgattcagcaagcccggtaaaactgacagtctctgatacccataaagccacatcgtttcaggtggaatccggtgaaacccgcagtgatcatgtcgtggttaatgcggtaactatcagtatggatttaatgctcaccggcgaaacagaagatgagtttaaggcaatgcagcaggcgtatgactatcacaagctggtgtgtattcagaccagggtgagagcctacgggccgatgctgatcacctcttttacccatgatgaaaatccggaaatggctgatggtctcagcctctcgctgacctttaccgagtggcgggtgattgaaccggaatacggcgaactaccgccgcgcaaggtggtgaagaaaaaacagagcagcacagtgaacagcggcaaagtgcaggctcagacggcggcaccgccaccggcgaaaaaaagttctgttgccgtaaaacttgccggcggggctgccggtaaaccggggggcaaatgaaaattataccactgaataccgtgccgaatcagcgcctgcgggtcacgctgaatgaacaggaatgggaactgacaatcaaaaccgcgcacggagtgatgtgctgtgatatccgctgcgatgatgagattgttgtgcaggggatgcggatgctgccggatcagccgctgatcccgtaccgctatcttacgtcaggcggcaattttacgttactgaccggcggggacgcattgccctggtgggaacagttcggaaaaacacagacactggtctggcggggggatgatgattgacttacgcaggatccgctgcgccatcgaggttaacggccgtctgcaatggtatgagggcatgcgtatgcatgcttcgggcacgaaatacgccaatccgttacagaatgactgttcattcagcattgatggcctgaatacacaaacccgcaacatgctgctgacggaaaccagtccctttacggagagcaaaacaccacaccggatcattctggaagccgggcggcgcagtaccggcgtattccgcatctttaccggcgatattgtcagcgcggaaattgcgtcaccgccggatgtgacactgacgctgaaagccaaaaccggcaatgccggcacccgcgatattgtgacttccggggggcaggcgatgtcaaaaatgagtgagatcgctgcaaaaatcgcaaaagactgccatgtttcactggatttccaggcgaccgataaaaatgtcgctaactggtatttttgcggtcccgcgctgaagcagattgagcggctgcaggacgccgggaatgtgaaagcctttattgatgacgatgtgctgtatgtgaaagacagggataaagcgctgtccggcaaactgcgtattctgagtcagaaaaccggcatgatcgggatcccgaaagcgacagagaaagggcttgaagtgtcatatctgatcgacggtgaatcctgcctcggcggtatgctgcggctgaacagcaaattcaacccttcgctgaacggggattacatcatcgagcagctgaaattcgatatcgcctcacatgaggatgcctttttttatacggcaacctgcaaacgggcctgacgacacgggcaaagcaatgaataaacctaacagtgatatggccagtgaaggcagtctggccgggcagtttgcggctgcgttccgcagtctgctgatgaatattgacgatatgctgccggccacggtggtcagttatgacgacacgagcaaccgggccgtggtgaaaccgctggtgatgatggtgacgaccgccggaaagaaagtcgggcgcggtgcgctggctaatattccggtgtttcgtttcggcggcggcggtttttttatccgtatgccggtaaaaccgggggatttcggctggctgaaagccaatgaccgggatatcagcctgattttccagcgcggcggactggaagacgaacccaataccgcacgtctgcacacattcagtgatgccatgttttttcccgatacactcaaaggctgggtaatcgacggcaaaaatacggatgccctggtggtgcagtctgcggatggtgctgtgtgtttatcgctgcacggggataaagccgtactggatacaccgttgtttgaggttaatgcaccggaaaccatttataccgggaatgtgactattaatggtaatcacgctgtgaatggtgacagtaatgcggcgggcggcaccctgaaacataacggcaaagacatcggttcaacccacaaacacagcggtattcagcgcggacatgaggattcaggagaaccgctatgatgacatttgatgtcagtgaaaataatgatctgttcaccgggggagacggtaatctcgccatcgcccgcgatgaacaggcagtaaaaaacagctgtgctcagtatatcaaagcactgcgcggcgaaatgctgcataagcaggacaagggcattccgtattggaaaaccacgttcggacggcaggcggatctgccggtgtttgaaaccgcattccgtgaacggataggggagatcccgcaggtcacagaagtgatttcattcgcggccgtcctgaaagataacaatctgagctataccgctgttttacaaactgaatacgggagtatcaggttaaatggctgaatataactatattacctcatccggcgtgattatcccggatactgctgagcagcgcacagccgttgaaaatgagtttaaggcggtgtttggtcaggatctggatatttcgccggaaaccccgcagggggtgctgatcacgatggaaacagagaatcgtgatgccattgtgcgtaataatgcggaactggcaaatcagataaacccggatcttgccggaggcgtgtttctggatgctatctgggcactgatgggaggggagcgccgggatgccacccgctcgattctgacgcaggtacagttcggcggtgtgccgggcactatcattccgaaaggggcacaggcagaaacactggccggtgacacgtttttcaccacaaaatcgctgattatcggtaaaaacgggactgtcagcggcgatatgcgtgcagttgaaaccggtcccgtggagtgtccggccgggcagatgatgacggtggccagttctgttctcggatgggagacggtgactaacccgaccggtgcggttaccggccggattgcggagtctgatttacagtcccgccgccgccgtaaactgacactggcaaaaaatacggtcagtgtcggtgaggccatgacttccgcgttgtatgaactggaaggtgtccgctctctggcataccgggaaaattataccaataccccgatggcagcgaacggtatcacgcttgtaccgcacagtgtgtatgtctgcgtcgagggcggggagagtcaggaaattgctgccgcactgctgcggaccaaaaccatcggtgccgcctataacggcagtgaggaggttgaggtgacggagccggtcagcgggcaggtttacacggtaaaattcgatcgcgcaaaagaagtggtgctgttttgtcgtgtgacggtcaaaaaaaccaccctggatgcacaaacgcttatcccggcggcggtggaagcctgggcaaacggcgataccgggggggatggcgggctggtggtcgggcgggaagtttcaccgtttgagatttctgccggcattaacgccgctgagccgcggctgtttatcaaccgtattgaattatccgcagacggcacacactggtcaccggatatttatccggtaaaactgacggaagttgccaaaattaaccgcagtgcggttcaggtggtgtttgtatgacagactccatccagtcgttttcatttcattcagatctgctgcgggcactgttatggcagtacgaagaggcggaaaacctgaaagcgctggcccgccataaattggactggtttgagcgggcgaccgtcagcttctggcagaactggtacaacgatgtgtttaatatcgataccgccactgattttggcctcggtatctgggcgcggatcctggatgtgccgctcggggtggatattccgccgcatgataaaacaaaaatcggtaccggttttggtaataaaaaggccaatttcagggcgaatttccggcgtaacagtgattacacactgtcactgacacaggaacaaaaacggctgattatccgtatgcgttatttcaatctgacgcaaagcccgactgtcagcaatattaatgaattccttgaacggtttttcggcaataaagacagcagggtatttgtgctcgatccgctggatatgacctatctgtattacgtgtttaattttaatccggatgaacgcctgcgcgttctgctggagaacttcgatcttatgccgcgcccgtccggtgtcggcgtcaaataccggattgtgaccaaaaaagcctttggtcatggtgaaaaccggaaaaacttcctgagcagtaacttcggagcataaaacgtatgactaaattatttaaagtcccctttgcaacacaaggggaccgcgctgctattcctgatgaagtccgggccgatggcgcggtttcctatacccagggctacgggtatgactacgagcgggaccaggccacagatccggctgccaaagatattgaacgtgagaagatgaacagcctgttccacgatatcacggaagcggtcggcgaaatgcagtccttcggagtgccggtctggcaggaggccggtaaaccgtatgctgtccgcagtattgtgtaccacaaaaataaaacctggcagtcaaaaattgaaaataacaccaccgaaccggttgccggaacggcatgggcagaactgaaagcagatttgaccgccggagaggtgggcgcttacagcaaaggtgagtctgatcagaaattccagcctgcgggtaattatctgccggaaggttacagttattccaaagcggaatctgatactaatttccaaccgaaaggtaattatgccactaaatctgaattgattaacgggttggcaggtaaacaaccggttggtgattatgcaactaaaacagagagtaacggaaaactagctaaagataaaaatggtgcggatataccggataaaagcgaatttatcaataatctcggtttgagtgaaaaatttcagccgaagggaaactaccaaccggcggggaattattatgtttttagtgatattacaacaatgccggaacgcggtttcaatggggttttttcaggcggagtgagtgttaaatatatcaaagggttttcaatatcatcaggaagcggagggtctgatacagcgcagctatatattgaccataaagcagggctgacagttagatatttaaataataatggggcagtaaatgaggataagattgtcggtattcctattggcgccactattgaatggcagtcagcagtagccattcctgacgggtttttaataaatgatggtcgcgagtttaatgcatctttatacccaatgcttgccaaagtttttccggatctgaaactccctgatgacagaggactttttaaacgcgcattagacaatgggagaggatatgattccggacgaaaactcgggagttttcaaaatgatgcaatgcaaaatttaaccgggaattttggtaacccgacaattgaaggcggtgatttctcagaaggagtattccggcattcagtaaataaaggcggacgtgctgctggtgccaatgcaaactcaatttcgtactcttttgatgcttcccggcaagtaaggacagctcatgaattcagaccggtaaataaagcggttatttatattacaagggttatttaaaatggcagaatacaatacaaaaattcagtacgcaaaatttgacaagaatggcctggcaatcactcccggatgggcggaggtttattgttgtcatccccttacaagagaatataccggcaaaagccaggatgaagttccgttaggatttagtttaaaagccgatgtttatttggataaaccagtaatacctgctcccggatttgcagttgttcgcagtgaagatggtaaacattgggtgcatactgaagatcacagaggtaaaactggttatgacaaaattacgaaagaaaaaattcaaataagtatgtttggtactttaccagaaaatctgacattacgtgaaccactgacaccttttgataaatggaatggtgaggagtgggtcacagatgagtccgaaaaattaaaacatgaaatcaccatagcgaatagtcgaaaacaatccttgctgtctgaagcagaacagatgattgttatgcttgagagaaaaatacgcctggggatggcaactgctgaagatcaggttaagctgacaaaatgggaaatttttagtatagaagtcactgatactgatacatcagcaggtatcgctacaacatggcctgtttttccggattcggtggattgataatatcagaagcggcggtttaatctgccgcttcttaatgaaaagagtaattaagtagaatgattagacttttatgtgtcctatacatgagagtagccttataacattttttaattttatatttaatgctgttagtattaataccatgtaagaatcctatggataaaaggaggatccggcttttctgaatacattgaaataaatgataactattttcggagcactgatactttgaaaatgcatcttttcattattaagtaaatacgggatcatatccatgaagagattagacggtgaaccatggcaatttaatcacctcatgcgtaaccagtgaatctgactgctggtgaaaatattctgccggataaagagacggtaatatttttacctgccacaaggtacggggacaatcacggcggtaaaacgctataatcggtgttcagtatattgcagataagggtaatgcttttatgactgacaacgacgatatgcgggcgtattcagaattcgattttgaagctattgcgcagtgtaatcaaatcagagatatgctgatggcggcgctggaaagacgaaataaagaaatgcagcgtctgcggataaaaacacaggaaattcagcgggaatttcccggtgatttgaaaaagcttcaggcgcatatgcgggaaatgaaagattccaataatgaagtcatggcgctggtcagagaatataatgtctgggctgaacgggccggataagctggtactggaatgagccgggtaacctgctgatatgacagcgcagatgctgcccggcattttatccggacattccgctccggtgccgggggtttttctgctgtttactgtaatgccccgtttacgtattacagtgtatttttctgccttctttctgttttttcttcttatttttttctgtcaccaaaagcggttgcggcagaaacaatgcacagcaatatatcaggacggaattctcttttatccggtattaaactgcggaatttttaccgtatgatttatatgagtaatacagacgatcgaaaagtactgctgcagcaaacgccggatgaaatgatactgcaatatgcagaaaaccggcaggcattgtttaacagcgcgatggataaagatccctctgggttgctttgtttcagcttcatttaccctgcagagccggataacggagctgtcatgacatttttacccgcaaaagaaacaatgccgggtttatctcaggcagaaactgacgcattatataccggtatctttctccggctgcgccatacctatggtgatttgctagatgaagaggaagccgaaaccctggaaaaggatgccatactggcctgtgaaataaaatcagcgctgtatcagaatatattacagctcagtccgcgggatgctgccggggtattacgttacatctggggcagggacgggattttctgagcggttacggaggaaatgatgcgtcattatattgccggaatatgtgctgctttgttgtctgtcgccataatacccgccggttacggtgcgggaacgctgaatcaggcggctcagcagcttgaccggctggtgttgtatgatccgtcctatgaaaaaatcgcctatcccggcggggatgtttcaccccggaaaggggtatgttcggatgtggtgatccgcagttaccggaaaataggtatcgatctgcaaaaagaggtgcatgaagatatcaaaacggcgttttctctctacccgggccgtaaattgtggggacagacacggccggatacaaatattgatcaccgcagagtgcccaatctgatggtttttttcagccggaaaggagaaaccaaaccgatcacacaaaacgcggcggattatgtggctggtgacattgtgacctggcagctggataatggtcgtccgcatatcggtattgtgatcggtaaaactgcgctgttcagcggaaatccgctggtcatgcataatatcggcggcggacaggtcagtgaggatgtgctgttcagctggaaaatcaccgggcattaccggtataaagccgggaaagaatgaaagagccggcggtatgccggctccggaaattattttttcacctggtgtccgataaggccgccgattgccgcaccgccgacggttccgagtgcgctgccgtcggtcaggattgcaccaccaacagcaccgacaccggctccgatagcagtattccggtcacgtttcgacatatttgaacaaccggctacagcaatcagcaggactgcggataaagtcactgtgcttactctcttaatattcattttcatctcataaactcctgaacaataggcgtgttacaacatagacctgttcgggaatcgtctgtatcagaataatcgggaaatacgtaacaatcccggtacattacctgatatcagctataccgctaatggcttaaacgacagatggcaatataaaataccgtaagtggagttgatggcattactgagatgttcaatccggccattatgcgccgtgacttcggcttcatcctcaatagcggcatccgcgacagaaacagcagtgaaaggatgtgtcggcagcagcgcttcttccgcatcgcactgaatgtgcaccgtggtgatatgttctgcatatgatgacatcggttacctccgcaaatcagaagatactccttttcatagtaaccggttcatgtgtaaaaaacagagaataaataacagtcaattcctgattttgttattttaagacaactatcagaataatatacgggcagataagataaactacgattggaatatatgcagggagttattgcacagcagggatcagaacaaaatggccgcaacagcatagtcccggccgataataatcaccagcctgctgcatcagtcataacagggatgtaataattaatcacccggactgccagtttcgggttttccgggtttaattcagtgatgttttcctgaaatatgtactcttccgtatccggatgctccggatggcggattatattcagttccggcagaatattattatagatatcataagtaatatcctgaaaatcaatatctgaaaaatcaccggtaaaaataatttttaagtaatgggcatgtccgggcgtataaacaatatcctgcggcatcgtatttttcaggcagtgtgcttcggccagggtggcataatacattgagaaagtgtccccggcagatttactgacaccgtgtatggcataaaccgcctccggtaaagcggtcagccgctgtaaaaaaggctgccagtaatatttgcgcagctttggcaggttcatattccaggtatccgatgccgcctgatacacattcgaagtcccggtcagcactttttccggcaatgtcgtcatctcaaccgaggagtgcagttttccggcataacgtttcggcagtacaaagcctcccggctgccagccgctttttttacggtatcctgacggggtaataccaaaatgttgtttgaaggcacggcagaatgtctgttgtgaatcaaagcggtacttcatggataaatgcatcaggttgagcggtagcaggcgcagggcgatggccgcacaggataaacgccgtgcacggacataatttgccagggtatagccggtctgttgtttgaaaatacgctgaaaatgccatttggaatatccggctttcccggcaacggcttctaatgaaagatcagactcaagattattttctatccagtttaaaatttcatcaacaacgcattcgttaaacatagcttttccgtgtatttctcagacggaggtattatatcggcaccggtattgaaaaacagctgatttacaataacaaataaatttcccgttttcacagggcgggcaaacatggttataactgtataaataaacggttaattctgcctgtaataaacatggttttatctgtccggcaatgtaaaataccgcagatattattaacgaggtggaaaatgaaaaaattactggcagttatcgcgctctcttttgctcttaccgcttgtggtgatgcaacactggatatgtcttctcagcaggcagcacaggaatccattgcaaaaatggaaaaagatctgagcccggagcaatcccgtgagctgaaaggcgctattactaaaatcagcttccaggtggcttttgccagcggtggcgatgaagaaaaaatgatggcattgctgaaagaaaaattacagggtaaaacagcaaaagaaattattgaaatggcaaaataacccttttcagcctgccggtttatctgctgccggcaggcttagttttacggttaacggtttctggctgcatcgcggtggaatttaagacgttcccggcagtttcatcttatcccgcatgacaaggctttttgtcagggactcaatttcgtcctcttcttcctgtgtcattttcggcttctgcatattctctgacatagatcctcctttttctgtcagtctactgtattttacggccgggtgtgagaccgtgcttttactcaggattattccgcagcgttattcctctgatgccggcaatattccccgcgcagataatgatttaacggttgcttcaattactgtatccgcagaaattgaggccatttcatgctctccctcttccagtagtaattttgaggcaaacccggaaataatttcatgtaattcatagtcctgataagggccggtgaattgcgggcaggtgctgacatgcatgctgacactggggacttttaacgcaaatgccagatgcatggttccggtgtcatttgtgaccagaagatcaaggttatttacgatttgtgttaattcttcgacggtggttttaccgatcagaggctcaatccggttgtgaaattccggctcaagtaaactgagaaactcatcggacaggcgaatttcattcggcgcgccgaccagaacaatattcaggtcacggtaccgggtaagcagagtgcgtgcgagtgtgacaaaattctcaaccggccagcgtcgttcctcactggaagcgcccatctgaaaaccaacccgtcttaccggtgacggtacttttgtgacctcacacggtacccgcatctcaacacttttttcggtaaaccggcagccgagcggagtgatcagatcaaggcggacctgtactgaatggcggtgtgcaaagcgggtcgagtttgtcagccagcgctccatatacgggtttgtcggatgattacagcggaaaacaaacggtgccccggtcatgactgcgctcagataatcatacgggttatgtgagtgcataatcagaaccagatccggtgttccgtgcgcttttaaatccctgaccagtttcagtacggtattgactttgctgttccagcacaccacatcgtcccagtccttaccgataccagtgcggatataaggtgccattttattgccggaaacaacggtaattctggcatcaggaaaacgttttctgacttcatgaatcgccggggtattcatcagaaaatccccgagtgccgttgtcgaataaataacaatattccggaagtcgatagtcttcagctgtttaaaggcagcgacggagtgcgaaaaatcacggcggcgcgtataaatctgtaagaataaattaaccagtttatgtttaagttttttggacatcgtatttcctgaaaagcgaccaataatagcatggcgctaatttagcatattccgccggaaatccgccggttcattttcatgttatttccggcgggtggcgagccagcataataaggaaccaccggtgaccatcagtaccccctgccagaatgcaaaggagagggcggtgctgagtaataatgcggaaaatgcggtggaaagtaccggggtaaaataagagagcgtgcctatcagggcaacattaccgcgcagtaccgcgatggtccagagtgcatttgcggcacaggacagtgccgcagcggcaatcagaaaaccaacggtcgacacggaaaattcagcgggcagtgtgatgccgtcaaaggcggttaccacccacagcatcagggcggtgatgataaaaaacagggtaatgccgttattaccatccgccagcctgcgtgataaattactgtagaaggcccagatcaccgcaccggcaaacgccaggccgtaactcagcggattaagtgcgacgttggcggcgacagagctgagggataacccgttctctccgccaatcacccggctgataccgagcaccgccagcaccagaccggctatcagcggcaggcgcagacgctgcccgcccatgagtacagccagtccgacagtcagggaaggccacaggtaattcaccatacccagttcaatcgcctgctgacggttctgagaaaaaccgagcgccagaataaagcagatctcataactgacgaacaacagcgtgccccagataagatagcggcgcggccagcggcggatggccggaaatccggtcaccagcagtaacatcactgagcccagggtgtatatcagtgccgcaccgaaagcaggcccgaaatcctcactgacccgtttgattaatccgacaatagtactccagaacagaatggccagaacgccgtaaaatgtggcggtgtgtgcggacagttttcccatgaatatcggcctgtgataaataattgacaatatatgcgttaaactaataatgatttcccagcataccgtgatatgaccgccgggcaaagggagagatcctcatggccggactgataaggagcctgacgatggaagcacaacagattctggatttttggtttaatgaagccacaccggaacaatggtttaagaaagacacacagtttgatgacctgatccgccgccgttttcttaaggtatgggagcaggcagctgccggagaatgttccagctggcgggcacacatcggcggacgtctggcggagatcctcgtgctggatcagttttcccgtaacctctggcgcggtgacgcgcggtcatttgcacaggacccgatggcgctggtgctggcacaggaagcagtgaaaacaccggattatctgcaactgcccccggttcagcgcaagtttgtgctgatgccgtatatgcattcagaatccgcactgatccatcagcaggcggaacagttgtttaaagggcttgatgagagcactgaggattttgagcggcggcacaaagcgatcattgaccgcttcggccgctacccgcaccgcaatgagattctggggcggaactccaccccggaagaggcggagtttctgttacagcccggctcggcgttctgattcacactcacgggcgaaatgcgcggcaataccgcgcatatcaaagcccgttggtgtctgatgcacccgcagccagaattgcggcaggatcgcaaacaggtgatcaaaaatatcggactggatttgctcatagcttatccacgccgtcacattggtgaaggcgtagatttccaccggcagcccgtccggtgtcggtgccagctggcgcaccatggtcgtcatcttcttgtgaatatgcggactggctttgatgtacgcctccgcatacgcacggaatgtcccgatattggtcagccgccgctggttgagcagggtatctccgggttcctgcgcattgtattctgcgatttcctgtaatttggcatcgatatacccggctatcaggtttgattgccgcagccggctgatctcttcatcagtcagaaaacggatgctggtggtatccaggttcatgctgcgtttgatacgccgtccgccggatgccgtcattccctgccagtttttgaaggaatcggaaatcagggcgtaagtcgggatagtggtaatggtattatcccagttctgcactttgaccgtcgtcagcccgatatccgtcacagcaccgtccgcgccgtatttcggcatctccagccagtccccgacattaagcatatcattgaccgacaactgaataccggccaccaggcccatgatcgggtctttaaagaccagcatcagcaccgcggtcatggcaccgagtccgctcagtaaaatcagcggggattttcctatcagcagcgaaataatcaggatactgaagagcaccgcgataatcagtttcaggctctgcatcacgccgcgcagcggaaggcggctcagagacggggtatggcgggagaggttctgaagaatgtccatcacggaaaacagcagcagcatgccgaacaacagacaccatgcctgtgcgccggtcgtgaggatctcctgtgcggcagagccgcgtcccagccagatcagcgcctggatattaaacactatcccctgaatcagaaaggcaaaccggttaaacagccgggtgcgggtaattaacgcgccccacggacgctgagcaccaccggtgcggcgttcaatatacggcagaaggcctttgtgcagggtaagatgcagaataacagcgatagccagaataaggacaataaccccggtaatggccgcccatgaggcgtagtcattactgagttcaaattgttgttgcagccataaccgcagttgttgctccataaaaaatgtctcctgtgacgtggtttttacagactccttagtgagcagcaaaatgttaaaaatgggatcacattgaatactgtaccatttttcaggcacgggtactgaaagggtatgtaaagatacgggaaaagcgaaaaaaaaaagaaaaaagggggatgtggcgcggcaaattatttgcccgcgccaccggatgcggttaattattctttttcagggcagaagcgacggcgatcagaccaaaagagctgaacagcagttcaataccgaccagagtcgcaatcagggtgacagacacaatcgggccgttaccgaccagcaggtaagcgataaacagatcgagcaggccgatgataatgttcagccagccgcgcgcctgagacatctgacgcagaccagaacccagacgcaggatcccgccggcaataaacagaatggcgagcagaatagcgaggctgagcatcccggtgagcggttcggtcaggaacacataacccagaaggagataggcgaccgcaaccagaacggaaaacagcttactgccgccgctgtagagccggctgctgagtgtcacaaataacatggagatcccgtttatcaggagaagccccccgataatatagctgagagtcacaccggatatcagcgggttcatcagacaggccacaccaccggccagcaggagaatggcgatgatccacaggtagccccgttgtttcttcagggcgtcggctgtcatatgagttaaattctgacgattaaaatcaagcatggtttttccttagtaagcccgttacagcggcatcagagcatgcagggcagcctgataccggatgcggaatatacccgaaatgataaacttcactttacattatttgcgataagtaagtatttgtgaataccaaatgcgtaaaatcagtgctcaataatcatgactgccgtggtatcgggctccagcgccttaaaaatatgcgggacatcgccggggtaggaaatatagtcgccgggcaaaagtgtggcgggttcatcaagggtaccgacaacagcactgccggtcatcagcaggatatgttcggtaacctgtgccatatgcggctcagacacgcggtctttgccgggctgcgcggtgatggtgtacaggtcacggcggttaaccgcagaagcggaagagagcagaaaagcgtggtaatacgcattctcggcactgacctgaataccttccccgcgccgcaaaacggttacccggcttttcggggtttcaaacagactggcaaacgggatattcagtgccacacagagcgaccacagtgtttcgattcccgggtttccctgtgccgattccagctgtgacagtgtggattttgcaataccggcactgcgcgcgacatcagcgatggaacgtccctggcgctgacgctcttcggtcagcctgacagccatgatctgcaggggcggggtgataggtgaatccataaaatacactctctgctggttaacggaaataacccggaattaacacttgcgtaattcaaagcgttcgacataatgaacgtatcgttcaatttataagtctatcgcaatgaaactcgctattccactcgataatgccatgatccgcaatattttgctggtttgtgtggcggatttaattgtcggcgtttcctacggggcgctggcgcatgccaacggttttccgctctgggtaccgctgacactgtccctggttgtgctggcaggggcgtcagagtttctgtttatcggcgttgtggcggccggcggcagtccggtgtctgcggcgctggccgggttgctggtgaatgcccgtcatgtgccgttcagccttgcggtgcacgaccttgccggtaaaggcccgaaaaaactgttgggcttccatattcttaatgatgagagtgtggtgttcggtctggcggaaaaacagaaggacaaacagaaagccgcattctggctgtgcgggctgggaatttttctgtgctggccgctggggacgattatcggtgagtttctcggtacctttattgtggataccaaagcgctggggctggatgccatgttcccggcgattatcctggcattgtgtctgcctgcactgcgtgaggcgaaaacacgccgcgctgctctgctgggagcggtgattgccctggcggcaacgccatttttaccgccggggatcccggtgctgttatcactgctggggctggtggtcagcctgaggagagcgtaatgccggatacattatccattctgacggggatcgcgctgctggcggtcggtacgtatgccatgcgggcgtccggggcgctgctcagcgggcgtttctcggtgtcgtcacacgttaaaaatctgctttccacgggggcgattgtcattctgtttgctgtggcggtaacgatgacgattttcagcggacaggaattatcagactggccgaaaatggccggagtggcggttgcgggaatactgacgtggtataaaaagccgtttctggtgattgtgctggccgctgcgattgtgaccgcactgctgcgttatctgctgtcgctgtggtaaacagagagacccgcgcagcatcactgcgcggatgataaaagattattgtgccagccaggcggcggatgtggtgatagcagccatcgggcggagcatctccagacttatctggtgcaactccgctgtcggtgcggcacacaaatcctccgctaccgagacataaaacccgctgtcgtgggcataacgcgcggtgctctgaattgccatcaccgtgctgacaccggccagaacaaggtgttcaatcccggctttacgcagccagatcagcaaatcatttcctgcaaaggcactaacgcctttcttcacaaaacagacatcctctttctgcacatccgtaccgtctgcccagtcacaaccgctgccgctcagtttcagggcaccaatctcttttgcccgctgaaacatcggtgatccggcggggatatcatgccagtcatccgcaaacccgacccgcacccataccacgggaatatcccgctgccgcgcctgacgggcggtttcccgtgtggctgcaatcagattacgggcggcagtctggtcatggcaggcgttggaaagcccgtgtttgccggtaatgtcattaataaggtcgataataatcagtgcctgtttcatctgtccctcctgttctgacttttttcagcatagccttatgtttcagaactgtcatgggaagcagcggaaatttcacggttttttgccggaatgtggatcacaaacccgataccgcgctgctgcaatccttcggtgacggagagataaccgccgattttttccgccagattctgtgcaatggcaaggccgagaccgctgccgttttcactgcagcccggcacacggaaaaagcgagagaacaggcggtggcggtactgctcactgatgccgttgccgttgtcgcggataataatctgcacttcatccggattgccggtgtccagcgagacttcggcctggctgtccggcgggcagtatttcaccgcattattcagaatattgttgatgatggagaacagcgcctgtttatcggtgacaacaatgcagctttccggaccgtcgaaggaaaactcaatatttttgcgcagggcgtagggcaccagcatggcaatggtgtggctcagtgcctgggtcaggtcgatctcttccattttcagcggataatcttccgtttccagccgggccagatcaatcagctgccgtgacagtgataccgcgcgatccagactgatttccatatccgcagtgatttcgttgcgctccgccgggtcatcaatctgtttgagcagatgaatttgtgccagtacggcggcaatcggcgtacgcagttcatgagcggcatccgccataaactgtttttcccgcagattggcggcatccacccgctgcatcagctggttaatggcatgcagtaccggacgcatttcattgtactgatatttcatgctgatgggtgtcaggttgccggggttacgggtggcgatactgcgggtggtttcacgcagcgggcgcagactgagataggtggtgataatcgtggatgagagcatggtgccgagaataaacagcagcggaacggcggtgccggttgccgggtcgccgatcagcatatggcggtcggtgccggattccccgataaccgcagtgcgctgcatatccgggtcggtattataagcaagataccaggtttcgccgtcctcggtgaaacgctcgattccgtctggtttcagcggaatatgaacatccggtttattactgtacagcacttcgcccgttgtactgtgcagaatagcgaccagcggatcataattttcctcttccaggccgcttttcatcgcattggcgtacatactctccagggcacgggcaatctgcgggaaggtggcggaatccgtgggggtttcccgcagtgtgtcagagacaccacgggcaatcaccatctgctgggcattaaaatcttcacttaaaccgggcagataagcgtatttcagccaggctatccagacgccccacagcaggagcattgagaaggtctgaaggagaacggtataaacaaagaatgagcggattctcacttattcgctgtcctttttcagcagataaccaattccgcggacggtaatcactttctctttaccgattttgcggcgcagattatggatatgcacttccagggaattactttcgattttatcgtccagcccgaataaacgctgctccagctcatgcttgcgcaccacattaccggtattgcgcattaattcatataacagctgatactctttgccggagagcagtaataactcgtcattcagtgtcacctgatggttcatcgggttaagggtgatattatccactttccataactgtgaggaaaaactggcaatacggcgggaaaccgctttaacgcgggaaattaattccggcagttcaaccggtttggaaataaaatcatccgcccctgaatcgagggaattgaccagatgatcacgctgattgcgggcggtcataataataatcgggatttgctccccgctgttgcgccactccaccagagagtcaaacccgtcgccgtccggtaaccccagatccagcagcatcaggtcaaaatgctgttctgtcagccgcttacgggcatcggccagtaaacgcagccagcacacacgaaaaccggccagttccagtccccggcacagtgctttacctaattgtaaatcgtcttcgactaatagaatttgcacgtttcctctctttctgtaaaagcgggctctctgtaaaagcggattgcagtatagcattgacgattactgtgacaacgcaggcaaattattgtggcaacggggcttaatgtacccttaatcaatcccgcttaatgtgatatccggtttataaaatcatcaatcagatgaccggcatatttttctgtctgtttttgcaggaaataaaaataaaaaatggtgccgaacaacacggcggcataaataaacactgcccagatataggtcaggctgtaatccagcagggtcagggataaatagctgatgtcgatattcagtgacagggcatcaataatcttctgtgaaaacagcagcagggagaagagtaataccggcagggcgagtaacccggtcagcatattcacctttttgcggcgttttgccagggcgggataatgttcatcgtgcatataggcggcgatatcggtgagctgatcgtccagatcgtcacggcaggctaccggcgcatcctgtttttctatttgctgatgcaaaaggcgtaaaagctgactgttatcgatgctttttgcaaaagcggtaataattcccatgcggaactcctgaaagtctgtgtcggccggctattatttaacaattttacagccgggtcatgctgatttattaacattacctgaattaaatcataatctgcactctacggtacaatacagatacgttatagcggaaaacactgtgttatatataacggcagaatacatttatctttcagggattatcatccatgttacgcatcaccgcactactggaaaatacgaatactgacccgaaactggattctcaccctggtctcagcctgttgctggacgacggggaaacctcgctgctgtttgatacgggcgcggatgatacctatatccgcaatgcacaggcactggggatttcactggaaaatattgatgcggtggtgttgtctcacggtcattatgaccatttcggcggattaacccgtacggaacggcataatctgccgtcggcgctgaaggtgattgcacacccgcatattttcgagccgcgccgcgccgcattgtggctgggcagttacccgctgaaattcaagcggttatctccgttattttgtgaagaaacactgcgccgtgactatcagttcgtgctgacggaaaaaccgtattctatctcatcccgctttctgttcgccggagaaatcacgcagcgggccgtggtgcgccgttacggggtactgctcagtaacggtgaggcagattatgtgcgtgacgacagttttctgatctggcgcggggaggagaggattgtgattatcaccggatgcagccattcaggtattgaatcggtgatacagcatgcgcgtgccctgacagataatgcaccggtgcaggcggtggtcggcgggctgcatctgcgccgagcaacaccggcagcactgcgccgcgcacaggaggccgtggatccgcaaacccgggtgtacggctgtcactgtaccggtgccagagggcgcaatgccctgaatgcggacgattttaataccgggcagcagctgacattccgctgagtctgcccggcggggttatcagccgtgcgcttccaggaaacggacatacgcatctgcccatttctgcacaaacgcaccggttttttcactgaatttaccgttttcgccgatcatgccgtcataccattgcaggtacatctccggctgattaagtgtcggcatattcaggaatgccagcacattgcgcagatgctgctgtgccatcgcggtacccatcgccccggcagaggtaccgattacagcggccggtttgttatcccagctgttttgtccccacggacgggagccctgatccagtgcgtttttcagcacacccgggatagaacggttatactccggcgtaacaaaaattacgccgtcagcctgtgaaatctgctgtttgaatgccagcacctcagcaggcggctgtgcgtcacagtcctgattatagagcggcagtgaaccgatactgacaaattcgcactgaatgtgtgcagggaaaagagagaccagagcatgcgccagctgacggttgtaactctgctcacgcagtgaaccgacaacaacagcaacgcggtactgtttcattgtaacctcctgaaccggtgaaaacccggtgatgaacaagcaataaaacaaatgaaaacgttactatcatagtgcggaatcgcggaacagagagcaaaatttagtaaatttctatgacatcacaacaaaaaaagatcttatcaggagccggaatgactatcccgcaagccccggaacgcccggtacagttcactgcacatggtgaaacccggacggataactattactggctgcgggatgatacccgcagtgatccgcaggtgattcagtatctgacggatgaaaaccgctatacacagcagaaattgcagtccgcagagccgctgcgcgaagcgctgtatgaggagatggtcgcccgcatgccgcaggcggatgaatctgcgccatacagttacaacggttatgtttaccgcacccggtttgaggcgggcaaagagtatccgctgtatgagcggcgtaaaataattagcggccagtgggaagtgctggcggacggcaatgaacgggcacaggggctggcctattatgagctggtgtctctggcggtcagtgcggataaccgccgtattgcgattgctgaggataaagtcggccgccgtgaatatcaggtggcttaccgtgatctgaccgataatcactggcaggaatcagtgctgacagaagtggccgacgatctggtctggtcagccgatggttcggttctgttttatgttcgtcaggatccgcagacattgctgccgttcgaggtatatcgccaccgtttcggcacagataccacacaggatgaactggtataccgcgaggacgatgaccgtttttataccgggttatccctgtcatcctcccgtgagtggatttttatcggttgtcacagcccggtaacctccgaagttcagcttatcaatgccaatgatccattacagccgccggtctgtttctcgccgcgtcaggacgggcgtgagtatcacgtcgatcatctggatggtcagttttatatccgctctgaccatgaaaacgaactgtttggcctctaccagacgaatgcaccggaaaatccgtggcaaacactgattgcgccgcagccggataccgacctggaagatttcacgctgttccgtgactggctggtattacaggaacgccacgccgcactgccgcaaatccgtattattcaccggcagagcgggaaagaaacacaggttgcgtttgatgacggtgcttactgcgcgtggctcgggctgaacccggagccggacagtcagctgctgcgctacggttatacctcgatgaccacaccggcatcggtgtatgagctggatatggtcagcggggaacggacgctgctgaaacaggcgcaggtaaacggttttcagcgggataattatcacagtgaacgaatttggatcactgcccgtgacggcgtgcaggtaccggtttcgctggtctggcataaagatcactatcagcagggattcaatccgctgctgattgaaggttatggcgcgtatggtgccagtatggatccggatttcgacgccaaccggctgagcctgctggatcgcggttttgtttatgctcaggcgcatatccgcggcggcggtgagttgggtaaacgctggtacaatgccggaaagatgcagcataaaatcaacagttttaatgattttgtggatgtgactcgcgaactgattgcccggcgttatggtgcggaaaaccggatctacgctaccggcggcagtgcaggcggcttgctgatgggagcggtgattaatcaggcgccggagctgtatcgcggtatcgtgacacaggtaccgtttgtggatgcactgactaccatgtcggatccgtccattccgctgaccaccggcgaatatgacgagtggggcaacccggaaaatgaatcagcttaccgggatatccgcgcctacagcccgtatgacaacattgaggcgaaagcctacccgaatatgctggtgaccagcggcctgcatgattctcaggttcagtactgggaacctgcaaaatgggtggcaaaactgcggaagctgaagacggatgataatctgctgctgctctatactgacatggaagcggggcacggcggtaagtcagggcggttcaactatttgtgggatgtggcgctcggttatgtgttcctgctgatggtggatgaacagcaggcttcgtgacactgtcacttaatgtgtgacaatgtcaccggtaaaattggatgttactcagcggttttccgtttacgggcagccgcttttttgtgcacggcaataatttcactctccacactgccatcctgtaacagcgtggtgattttttgcccgacttttacctgacgggttttgttcagcacttcaccgctgtctgtctgactgatactgaagccccggctgagtgttgccagcgggctgacaccctcgagtgtagagcagaggcggccaaaccgctcgcgctgctgactgagctgttcacgcatggcagaggaaagacggtactgcaactgctgaatatagcgctgctgctgttgcagttgcgggcgcggatcccggcgcatcagacgctgttctgtctgtgtcagctgacgggacttttgagtcagcataagctgtccggcctgaatcagccgttgttccaggcgctgaataagctgttgctggcgtgccaggcgcagttgcggatgctgctgctgtaaccggtggtgtaactggctgaacaaccgctgttttctggcgataaaataatccatcgccatttccagccgttgttgtacggattggatctgccgcaggcgctctgtcaggtcccggctgaccagttctgccgccgcggacggggttggtgcccgtaaatccgcgacaaaatcggcgatagtgatatctgtttcatggccgacggcactgatcaccggcagacggctggcaaaaatcgcccgcgccacccgctcatcattgaaactccacaaatcttccagtgaaccgccgccgcgcccgacaatcagcacatcacattcattacggcggttagcggtttcaatcgcacggacaatctgtgccggtgcatcagccccctgaacctgagcggggtagataatcaccggcagtgacgggtcacggcggcgcagaatattcagaatatcgtgaagagcggccccggtggcagatgtcaccacacccacacaggtggcaggtaccggcagcggctttttcagatgggtatcaaacagtccttcggctttcagtttttctttcagcagctcaaactgctgctgaagcagaccttcaccggcaggttgcatggactcaacaatcagctgataatccccgcgcggctcatacagtgtgatcgccgcacgtaccagcacctgctgcccgttctgcggcgcaaatgtcacacggctgttgttgccgcggaacatagctgcccgcacctgggatttttcatctttcagggtaaaataccagtgaccggaagacgggcgcgaaaagttggagatctccgcgctgatccaaatccggcccatttccagctcgagtaactgccggacagtcgtatttaaccgggtaacagtaaaaattgcggtattttcaggtagcaacatgtgagccagatcaaataataaaacaaggacttaattgtccgatactaccgccttctgacagattagcaacgaatttttgaaaaaaaggctaggcgcaaccgattaccacctgtataatgccgcggcaatattttatcttctttcaatcctgctgcctggtgagatattgcacatgttacgtattaaaaaagaagctttaacctttgatgatgttctcttagttcctgcgcactccacagttctgcccaacactgccgatttatcgacacaactcaccgcgaaaatccgtctgaacgtcccgatgatctcggcggcgatggataccgtaacggaagcccgtctggcgattgcccttgcccaggaaggcggcatcggttttattcacaaaaatatgtccattgagcgtcaggctgatgaagtccgccgtgtaaaaaaacacgaaagcggtgtggtttctgatccgcagactgttactccgtgcaccactctgcgcgaagttcagaccctgactgagcagaacggctttgccggttatccggtggtcactaccgataacgaattagtcggtatcatcaccggccgtgacgtgcgtttcgtgactgacctggatcagccggtaactgccgttatgaccccgaaagagcgtctggtgaccgtccgtgaaggcgaagcccgcgaagtggttctgaagaaaatgcacgagcgccgcgtggaaaaagcgctggtggtggatgattccttccatctgctcggcatgatcaccgtaaaagatttccagaaagcagagcgtaaaccaaacgcctgtaaagatgagcacggccgtctgcgtgtcggcgcagcagtcggtgccggtgccggtaacgaagagcgtgttgatgcgctggtggctgccggtgtggacgttctgttaatcgactcctctcacggtcattccgaaggcgtgttacagcgcatccgtgaaacccgtgaaaaataccctgatctcgagatcatcggcggtaacgtcgccacagccgaaggcgcgaaagccctggcagcagccggtgtcagcgcagtgaaagtgggtatcggccccggttctatctgtaccacccgtatcgtaaccggcgtgggcgtaccacagttaacggctatttctgatgctgttgaagcgctggaaggcaccggcattccggttatcgctgacggcggtatccgtttctccggtgatatcgcgaaagcgctggcagccggtgcggcatgtgtgatggtcggttcgatgttcgccggtaccgaggaatctccgggcgaagtggaactctatcagggtcgtgcttacaaatcttaccgtggtatgggttcactcggtgcgatgtccaaaggttcttctgaccgttacttccagaccgataacgccgctgacaaactggtgccggaaggtatcgaaggccgtgtggcttacaaaggtgtactgaaaaccatcgttcaccagcaaatgggcggcctgcgctcttgcatgggactgaccggttgtgcaactattcacgaactgaatactaaagcagagtttgtccgtatcagtggtgccgggattcaggaaagtcacgttcatgatgtgactatcaccaaagaagcaccaaactaccgttcaggtctctgattcatgcggcggtctgtggaccgccagcctataattgtttgctcttggaacatacattaatgacaacgaatattcatcagcaccgcattcttatcctcgactttggatcgcagtacactcagctgatcgcgcgccgtatccgtgaaatcggcgtttattgtgaactgtgggcatgggatgtcactgaagaacagatccgtaatttcaatccgaacggtattattctctccggcggcccggaaagcaccactgaacacaacagcccgcgcgcgcctgagtatgtcttcagcgccggtgtaccggttctcggtatctgctacggcatgcagaccatgtctatgcaactcggtggcgcagtagaaacctctgacgagcgcgagtttggttatgcacaggttgaaatccgcgaaacctgcgaactgttccgtggtattcaggatatgctggatgacaacggcaaaccgctgctggatgtgtggatgagccatggtgacaaagttaccgctatcccgtctgatttcgtgactgtcgccagcaccgaaacctgtccgtttgcgatcatggcgaacgacgaaaaacgtttctacggcgtacaattccacccggaagtgacccatactcaccagggccaggaaatcctcaaacgtttcgtgctggatatctgtcagtgtgaagctctgtggaccccggaagccattatcgaagacaccgttatccgtctgcgtgagcagattggtgatgatcatgttatcctggcactctccggtggtgtggactcatctgtgactgccatgctgttaaaccgtgctatcggtaagcgcctgacctgtgtattcgtggataacggcttactgcgcctgaacgaagcagagcaggttatggagatgtttgcgggcaaatttgacctcaatatcatccacgccaaagcggaagaccgtttcctgaatgccctgaaaggtattgcagacccggaagccaaacgtaaagctatcggccatacattcattgaaatttttgatgaagaagcgtcaaaacagaaacaagtcaaatggctggcacagggcactatctatccggatgtgattgaatctgccgcctctgaaaccggtaaagcccacgtgatcaaatcccaccataacgtcggcggcctgccggaagatatggagctgggactggttgagccgctgcgcgaactgtttaaagacgaagtccgccgtatcggtctgcagctgggtctgccgtacgatatgctgtaccgccatccgttcccgggccctggtctgggtgtccgcgtactgggtgaagtgaaaaaagagtactgtgacatcctgcgccgcgccgatgctatctttatcgaagaattacacaaagcggatctgtaccacaaagtcagccaggcattcactgtcttcctgccggtgcgttctgtcggtgtcatgggcgacggccgtaaatacgactgggttgtctcactgcgcgcagtcgaaaccatcgactttatgaccgcacactgggcacatctgccatacgacctgttaggccgcgtctccaaccgcatcatcaatgaagtcgacggcatttcccgtgtcgtatacgacgtcagcggcaagccaccggcgacgattgagtgggaatgatcctgcaataagaaattagctggcagtggctggcaaaataatgagttaagcccatgtaaaaatgggcttttttatttttggcggttgttgtatctggtacttattagcagcgccaagcacaagttgaatgaggtattaaagtcggtattatcgcatctttttaccgtgatacttacattatggctggtataaaaagataaaataagaaaagagtgatgaaggacaaaatgagatatttttgaggatcatctgaataacgaatgatcatcaacatacgacgatcagtagatatcatttcattccggaacaataaaacaaagaaagaattaatatgctgttttttagttaaactataatgagcatattgttataggtgcataaagcgattgccatttactccgaaaaaaccagcataaaaaacaatataatcaacaaataacaaatatcgttcattttttttgacttctaaagtcaaatttggcatctggtcattatccggtgccggcctattatgtttcctgtcagtgagcaagattaatatttatttttatcaatttaaccaattgaacaggaacgcattatgtctaaattagaactgttaaacccacaaaattctgccgttatttttattgatcatcagccgcaaatggcctttggtgtggcaaatatcgaccgccagcagctgaaaaataataccgttggcctggcaaaagcagcaaaaattttcaatgtgccgacaatttatacctccgttgaaacagaaagcttcagcggatatatctggcctgaattactggccgtccatcctgaatcaaaacctatcgaacgtacctccatgaattcctgggaagacccgaaatttgtcgaagccgttaaagccaccggacgtaaaaaattagtgatggcggcattatggacagaagtctgcctgaatttcccgaccttaatggcgattgaagccggttatgaagtttatattgtgacagatgcatccggtggtacctcagttgatgcgcatgaacgttctattgatcgtatggtgcaggccggggctattcctgtgacctggcagcaggtattgctggagtaccagcgcgactggtcccgtaaagaaacctatgacgcagtaatggggctggttcaggagcacagcggtgcttacggcatgggtgtcgattacgcctatactatggttcataaagcacctcagcgcgttattaagtaacagcgtaacaaccggagaggtcgctctccggttattttttcctataccgcttgccgcaacagtatttgataagcagtgagttcctcataaacaggaaacacatcatcatgaataaacgcttcgcatcaaaaatatttatcaacggtgatattcatacactcgatcgtgaaaatcccgttgctcaggccgttgctgtccgtgacggcaaatttattgctgtcggaaccaacgatgaagttatgcagttacggaatgaagaaacagagattattgatcttaaagggctggtgattattcccggcctgaatgattcgcaccttcatcttatccgcggcggactgaattataacctcgaattgcgctgggaaggtgtgccgtcattatcggatgccctggcgatgttaaaagcacaggctgatgtgacgccggcgccgcagtgggtccgtgttgtgggtggctggagtgaattccagtttgccgaaagacggatgccgacattagatgaaatcaatgcggtttcaccggataccccggtttttgtgctgcatctttatgatagcgcgctgctgaataaagcggcactgcgtgtgatcggttataccagagataccccgaacccgccgggcggtgaaattcagcgggatgagcacggtaacccgaccggcatgctgattgcaaaacccaatgccatgctgctgtattccgcgctggcgaaaggcccgaaactgccgctggattatcaggttaattcaacccgtcagtttatgcgcgaacttaaccgtctcggggtaaccagtgcgattgatgccgggggcggattccagaactatccggaagattatgaggttatcgcggagctggcaaaacagaatcaactgactatccgtatcgcctataacctatttacccagcgtccgaaacaggaactggaggatttccgcgaatggacatcgatggtgtcgccgggagagggaaccgattttttccgtcacaatggtgcaggggaaatgctggtattctctgcggctgactttgaggatttcctgcagccgagaccggatctgccggataatatggatgcggagctggaagccgtgatccgccacctggttgaacaccgctggccgttccgtctgcatgccacttatgatcaatccatcagccgtatgctggatgtgtttgaaaaagtaaataaagagatcccgtttgacggcctgcactggtttttcgatcacgcggaaaccatcagtgaacgaaatattgaacgggtaaaagtgctgggcggcggattggcaattcagcaccgaatggcattccagggcgaatactttgcggaccgctatggtcatgaagcggtgaaacacacgccgccggtggctaaaatgctgaacgcggaagtgccggtcggcctgggaacggatgcgacgcgcgtagccagttataacccgtggacagcgctttactggctggtgtcgggccggacagtcggcggtatgaagatgtatgacgacaatagccggttagaccgggataccgcgttagagttatggactatcggcagctcctggttctctgatgaacagggtaaaaaagggcagattaaatcagggcagtttgcagattttattgccttatctgacgattatttccgtgtgccggaagcggaaattaaagcgatagaatccctgctgacggtggtgaacggcgaggttgtttacggcaacggtattttcgggccgctggcaccgccgtcaattccggtattacctgactggtcaccggttattaaagtgccgggacactactcttatttacagcaggaaaataaagctgcgatcctgaatcagttacaccagtgctgcggttcgtgtcatgttcacggacaccagcatgatatcgcccgtaaatcgtctgtgccggttgcggatgataatgccttctggggcgcgctgggctgttcctgctttgcattttaattatcgctgtacatgttaatactgtggctggtggtaaaacaccggccatattaaaccggagatcatattcacatgactaatccgcaatcatcagcctggtcgccgctgcgtaaccgtattttctttgtgttatggatggcgacattattttctaacatcggaacatggatgaatgatgtcggtgcgggatggctgatgaccaatctgagtcctgatcctgtcatgattgccaccattcaggcgatgaccacattgccggtctttttattagccttaccggccggggcgattgctgatattttcgataagcgcaagctgcttatatttgtcaatatcatgatgttttttgccgctgcattactggctgttctggtctatttcaatgtggtcagtatcggctggttattgttaattacctttattctcggatccggtgcggcttttttaggcccggcatggcaggcgattgtcccgggtattgtggcgccgcatgaattaaaaacggggatcgcactgaacagtatggggattaatatcagtcgtgccattggcccggctctggccggtgtgctgatttcacaggtagggctttatcttccttttatgcttaatgcactcagttttattgccattattgtggcggtatggtggtggaaaggggagaaacaccaagaaaataccttaccggcggaatctgttgtcgccgcgatgatttccgggttgcgctatgcccgttacagtccggcattgattaaaaccattatcagagccgctgccttctttgtgttcgccagtgcttactgggcgatgctgccgctggttgccagagtgtcgcttcagggggatgcaacgttatacgggattttaaccaccagtatcggtatcggggcggtcgccggggcattcagtttatctgcgctgcgggccaggttcagtaccggaatattagtgactgccgggactgccggaacggttattgtgctggtgatctttgccgtgaccacatcaaaatatctggcaatcgccggcagtattattgccgggttcagctggctgatcacgctctccacgctgatggtgtcagcgcagacagcactgccggactgggtcagagcgagagggctggcgctgtatctgacggtattctcggggtcaatggcactggggtcattaatctgggggcagattgcctcacacacatcaataacaatcgcgctgcttgcggcggcagcaggtattattgttgtctggttatgtgtgctgaaagtgaaaattgaccacgacaatatcaatctatcaccgtctgaacatctgacaatgccggaggaattaccgtattctgaggaagataaaaaaccggtgatggtgtgtattcagtataaagtggatacggaacatcaggcgcaattttttgcactgatggagcaattaaaacggatccggttacgggatggtggttattccagagggctgttttcggttcccggtacgcaggatgaatttatggagacatttatggtgtcatcctcggcagaacatcaccgtcagcataaacgggcaaccgtggatgatcgccggattgacagtcagttaaatgctattatccggagcaaaacggttgtgcattatctctcatattctgcggatacggaaaaacagaaataaaacaggttgtacagataataaaaatccggcaataaatagttattgccggatgattttaattaactgaaacagtggttaccagtggtatgaatagctgagaccaatctgcaaaccatcattacggtaatccgtggtgtgataaccaatatcgccgcgaagggtggagttctccgtgataaagtaattcacaccggcacgggcatacggttttacactctggctgttgccgcgatcataaatataatcagcatcgttcacatactgaatatggccggtaaaggcatcacgctggtgactgagtttaatatccgcgccgatacctgcatccagttctgtgctcttattaaactgatgtttcaaatccacgccgagttgtaaatcaaggtttttatttccggcacggccataggttgccgggaaatcaataccatttgattctgtatatccggcacgggtgacattatgatatttaatagcagccagtggtgtcaccagggtatttgcactcacggtaatgccataaccggtggtgaattttacatagtaacctttgatatcagaattgccttttccggtttcagtgccccgttgtgcctgacgggtgatttccagaccctgctgtaaaaatgcagcggaaagctcactgttaaagccggagttatctttattttcctgataacgcagccatgcgccaacaccgggatgattattgccgcgggtgtcgtagccatcggccagacgggtatttacggcgaaattcagtgacgcgcccagcgtccagttttctgccggtaaacggaatgaaccaaatacgccggtggccacacggctgttctgatgcacattgtcatattgggtaaacaggccggcgcagtaattatcgtcacccatctggcaacggctttccgcgaggttatacagggcggtctggtataaatccagaacctgataactgctgtttgccagttttgttactgtattgcgggttttaataatatcaacaggatcagagaccgtgataccgccgttatcagccgggtcaaccggtgtcagcggcaggattggtttgactggtttgaccggctctgatggctcaagcggtgtcagtggttcagacggatcaaccggttttgacggctcaagcggggtcattggtggtttatagtccagtttccatagaacagcggatgtttcattattgtcattctgcacataaccggcgaccactttgccatccgcagaaatggcttccgcactggattcaccttcaaagctttcctgtagtggtttcagttcgtacatctttttttcacctgaaacatagacaaagccacgtgcgatatcatcttcgttatcggatgaacccacaataaattgtccgtcacttgaaacagatgaagcactggaatagccgctgttatctttcttcagggtgccgagatcacgcataccgtctttatcggtatgactcatcgcatgtgtttcatattcactgatatttgaccagcctacggtaacaagcccgtcagcggatacggcattagcgccggattcgcccgcattctcttctctcagggtgcccagtgaaaccatgcctttatcaccggtatatttaaatgcctgaccactgccgctgatgaagcggccgacaattacactgccgtcataattaacgccgtttgcggtggaggttgctgtttctgacggatctaataatgtaatgccgtcctgtccgctaaagcggaaagctttttcgtctgcaatgccgataacggttttaccgtcaccggaaatacccagggaagcgacactggcaaatgcctgctgatcagggatattcaccgtatcggtattggtatcataaatatacattttagagtcagatttattatttacatcaacgatataaccgatggcgatattaccgtctgctgaaaggccggagacataaatactgttattcccggctgcatatttactcaggtcaactgcattgccatcaataataatgaaaggacggtaattatcatttgagatttcataagtaccggcaactacacgaccatctgctgatatagcggcagactgaccaatgttttttatctttgagacttcataatccattgcggaaaatgccagtgtgctttgtgacgtcagtaataatgccagtaatgttttattaaagtgttttttatgtgcgtaagccatgatgatatttattcttttcaggtaatacgatgaagtgacttattgcagtgtcagcaataaacccggtgttgaatcaaaagttatgttaaaaaatcagattagttaattatattaataatatatgtccatcataaaaatggggatgcaaaccagatcgtgtcaggcacgcgtgtgccgttgcggatgactgcatgaaaattttgggttaaaccaatttgatgcgtaatttattgggttttcgatcttaaggcaaatgaaaattgcgctcagacacatttttttagtaaaaaaaacagatgaactgcttctggggaggttgaaagggtatttccggattataaatctggttattttgaataagttggaattaattgcaattgacgttgtatttatggcagatctgttttatgaaaggcatagtgttgtaagggtaaaagctgagtaataacatgatgataccgtgtttgttgcgttacgtcatactttcagtgataaagcattatcaactgattggcagcatccgatgaattgtttcagttcggttgcgggaatgtgttttttccccggtgaagagcaaaacggataaaaaatacgtcagatctgaatgcagagcgctgccttgtctgctgagcgggtgacactgatggtcatcaaaaaaagagtccggtaacagtatatttattgactaaatgaataagtaatatcattatatcgtgatgggtttcacataactaaaaataaaatgagtaaaatgatggatcttgaacgagatgggtaacaaacacggactggtatttcttgaacagacggtgaaggggatattcagggtattactcgcggcggttgtaattgtatttttattttcggttattctcttttctgtgctttaaatagctccggttcagtctcggtactgagcaaccaaaacggatatgtcacccttagtttattcagatattgatatgtcgactgaatcgacatatcaatatcttgtattttattaagccacactatttatagtgaagtttatttctaattttcacttcttattgggaggtgatttaatttaattaaactataatcacggtggtgagtttaaatattaaaaggtgcagtggttttacatgattttatgatgaattattatattctgttttattacccctgcgttaaaattcactaatgaaaacatatgtcaaaatattttaattctatcttattgactttttttaataaaaaacagaccatttctaatggagcgcataataattggtgctaacattatttctatgaatgatttaatgtaatctgccaaatataaatatggcagactccctcaatgattggagattggtataaaaatgaagttaggaacgtatgaacgaccaaaatattggggtgttgatggtgttatcggtgatatctactactatccggattatactttattctttagattaaaatataatggcagtccatctgataaaaactggtattatccgaaaaaagaagtcaataatcagttctgggattgggttgggtattaccccggaacgatgtcagagcccaaaacttggcgtgaacccggaatcgagggttgcatttactatgagccggaatatggttatttacgtttgaaaaaagacggtaatccgtctgaacataaatggtattttccatctgatggcaactcaaatgaatattgggattttatcgactttagggcaggtaatcctgtggatcctaaatcttgggatgtagatgaaggccaggaaggtgattatttctatagtgcgagactgaattctttttttatttttaaaaaaaatggtaagccatcttcttttaactggtattttccggaaaatggacaggataatacttattggcactatatgggacctttgaaaaaaaatgttggctgaagttcattgatggaaaattgcctattaaccagatatcattacccggtacacatgattcagcgacaggtacatatagtgaagggataggtgaaggcgggatggtaaaaacacaggatgattctgtttatgagcaacttaattcagggatccggtttattgatgcacgttgtcgtcatataagtaattcatttgccatgcatcatggaataatatacttaaataaaatgtttggtgatatcctgaatgaatgtaagcgttttttgcaggaaaacccgagtgaatttattcttatgtcagttaaacgtgaacatacagaagagcaatgtacccggagttttcaggaaacctttgagaaggaatattatgattcttattggtggtttggggaggaccgtttccctctgctggaggaagtcagaggcaaaattgttcttttcagccgctttggcggaccccacggaatacaaacgtcctggaaagataatgcaacatttgatattgacgaaagaatacatgtacaggatgaatataatcaaacagatgaagtcaaaaaatggcatgcaatagaaaatgcatggagttttgcagcctacagaggcaatactgaatggatgacaattaattttaccagcattgcagccggattttggggtacaaggagtataagggattatgctgaagataaaaactcggaactggctactcatataatgtcccgtggtgaatgctgtggtgtcgtcgtttctgattttcataatatcgctatgctttctaatggtgttattatgactaactttcggaatatgctaaatccggcaagaggattgtttttagcttttttattaatatcatagtgaatatgattatcacccgatagaaaaagagccggtaataccttaccggctcttcactataaaaatatgttatcccgtatatgccggtgtgttaccactccaggttcataccggcaccatacatgacatcaccgccgtttgatgttgaggttgccaggctggctttaactgccacatttttattgaaacggtagccgctgccgacagcaaccgcattttcggagttatatccgccgacagctgcactgaggttaaatttaccgacattatacggctggaacaggtttgacgtggcggctgacattgcaaagccgcgctgcatcttgtcattcagctcatcataacgcagctccagtttatcaatacgggccgagttgtgtgttgccagattatacgcattattcgcggtattattggctttctgcgccgtggtgttagcattaatatagtcaaattggcgtatttatccggctgaacttcagtcatttgatgttcatggtaagcagagttgcggggaaaaaagaacggcgggatgagaaaataaaacagtacggcggaccgtactgttttggtgaataaataagaggtgttttgttattttttactgcgttcgttgttatctttttcgacttcagatttccattcggaagtaattggttttgattgctgttttacttcaactgctttatttacggcgtcatacgctttgccgtaaccggctttatcctgcacataaccggtggcgttgtcacttttaatcccgatattaccggcttctgcgatagcatcaatattggcgccgaggaaaataaagtcccacttatcttctttctctgcagaattaatcattgatttaatcttatcacgactatattcattgctgctgttttctgcaccgtcagtaataatcacaaataacacattattatttttggtaattttgcggttttcacggattttatcaatagtaataccgacagcgtccagtaacgcggtattaccaccgacagaataatcatccagtgtcaggtttttgactttgctgataggctcgcggttatgcagcgtactgttttcgtggttgaataaaacggtggtgacgtaaatattgccttcttttttacggttttcggcaagaacggagttataaccaccgatggtgtcctgttcaaaaccggacatggaaccgcttttatccagaacaaaaaccagatccaaatctgccggtgccgcaggcttggtttcggctgccgcaaacagcgaggcggaaaataacagcaggagtggtgcaataaaggtgcgggagagcctgaacatagatattccttatactatttctgacagggttatacgacggataatgatgtattctgaggtgaacaaaaaatattcacagcagatttatctgattaactatcacgcggtttcttccgtccgctgcaaaatagcagtgaggtgcccggtgtctccgtggcggcgcagataacgggaaacatcctcttcccatgaacggccgtcgcccagtattgcccggctgcgggtggagtgccgcccgtagcggttctgatacaggctgattaatgtctggttgatcccgcggatatccggatgcggatttttatccatctgatgcgctattgcctgctgcacttttgcaatcgcggcaggatccggctcatagctgcattcatggtactggctgagcacaataaaggaaggcggaatattttcgtcatacgccgcctgcaaccgcagatggccatcgagtataatgtaggatgccaggccgctgatgtaccagatcagcaccggcggcagtttgccttcgcgggcaactttacgccagtatttcaggcggctgctctgcggttcaaccgcgtaacgcggcagcagctggtaaccgccgaaccaccagtccgcaaatataacccgtccgggggattgcagatccggcaggtcttcgctgtataacagccagtccgcattactgatatctttggaggacggtgaacggaaacaccatttttcccggggactgggggcattgacaacataaggggcggacggcggtctgatattcatcgggcgcagcagccactctccggccgcaagcagcggggaagggcgctcctgcaaatcacgggcgaagtaacggcaccactgcggggtttgttcttctgccggcagagcggcgattttctcagcctgttgtgagcggagcggcgataacagattctgctgagccggatggtcctgattataaatcagccagacaccacagtgatctcgcagtacggttgcccagaacagcggataaccacgcagctgcagctgcatccggctgttatggccgctgagcagcgcaggggcatcgtcatttaccgcttcaggattaaccctgacaagcaggctgtgccattgctgataatcatcaattttatcctgccaccagtaggttttcatggtatggtttcgcctcagattttccgtcaccggcacaggccgttgccggttgcacccttacattatttcacagtgaatgattatgtcttaccaatgtccgctttgccagcacccgctgacgcaccgctccggcagttacagctgcgaaaaccaccatcagtttgatctcgcgaaagaggggtatattaatctcctgcctgtccagttcaagcgctcgaaagagccgggtgacagtaaagagatgatgcaggcgcgccgggcatttctggataatcaccattaccgcccgatgcgggatcaggtaatcgcggcatttgagcagtatttaccggcacaggcggagcaggtactggatatcggctgcggcgaggggtactacaccggcgcactggcggaaagccttgcggcacggcaggtgacggtgtacgggctggatgtggcgaaggttgctgtccgctacggcgcaaaacgctatccgcaggtcagcttcagtgtggcatccagccagcggctgccgtttgaggataacagtctggatggggtgctgcggatctatgcgccgtgtaatccggatgagttaacccgtgtggtgaaaccgggcggcattgtgattaccgtgaccccggggccgcgtcatctgtatcagctgaaatcccttatttatgatgaagttcatctgcacccgctgaaggaagagcatttcccgggattcggtccggcacaagagcagcaggtggcttacccgatgttgctgaacggtgcggacgcactcgcgctgctttcaatgacaccgtttgcctggaaagcgacagaggctgtgaaacatcagttggcagcagaaaccgccttttcctgcgaaacagattttctgatccgggtttaccgccgggaagcctgattcagaaacaaaaagacccgccggagcgggtcatcagaagtgattaagcgattaaccaatatgttcatacagaatggtaaatccgatcaggatcagtacaatcccgccgacaatttctgcacgcttacccagcatcgggccgatataacgcccgaggatcatccctgtggtggccataatcatggtcatcagcccgatagtcatcgcggtatggacgatattgacttccagaaacgcaaggccgacaccaatcgccatcgcatccaggctggtggcaaccgctgtggtggcaagatgtaatgcactgtggcgctgtggtttttcatggcgggcgcagcagtcatcaccggcggtgacgctgttgtaaatcatgcgggcgccgagaataaacagcagtgagaaggcaatccagtgatcccattccatcacgtagcggctggcgtaaataccgatagcccagccgatcagcggtgtcagggcttcaatcacaccaaagataaatccggtacgcagtgcttcgcgtaaaggtggtttgtgcagggtagcgcctttgcagacagcaacggcgaaggcatccatagacagggccagggcaaggacgagggtggcgtaaaaactcataaactcagtctcggtcgggtagcttatccatatacacacaatccaaccccgacctccggtgaactgcgtgtctatggtcttgccaaccgaaacggcatccgcaccatgctgatataatatcacgcaagtatgttgatacggattttctgttattttcctgagaggttaataacagaacaggctactccccaatgacgtgaccggaaagatatcacagaaaataaaaaaggcaagaatatatattttagttttaaaagatgctaatgagaatgattttcattacatgatattttaataagataataaagactaatatcatcattagtctttatttctgtagggggataaaaagaaggggttattatttattattaatcataaaattataaattttttgtaaatcatcaagatgcgtgactttgatgtaaattttacgattttccaaacccacaagaagaataccgtcttctgataaattcattgtttttattctgtcatatttaatatatgcattggcgtaaaaaaatccgtcctgcttaaaatataacttcggtgaacgtataaaagccagataaatagcaatgataatacagccggaaagtaaataagttgttaacgggctgccgtgtccggttatattattataaataacaataccgataagaaggataaagatcacagcgtcagcgcggtgattacggcgcagttttatccgcagctgtgttttgccttttagtgtgttaacaataaattcgtcgtagacggcaaacagcagcatcagcacaatcacagccagcagaacaatatcatttacactcattgtggttcttttcccctgaagtgaaacagaaaacgggaggcgagcctcccgtttaaactaccatactctttctgaaaatacgcgttcgtcagaacgtgttttttaccggttacagtcccaggaaaccaaagacataacccagaatacccagcacaaagaagccgataataatcagcagggcattcactttatgacgcaacagccacatacagccgaatgtcagcagcagcggcatcaggcccggcatcagctggttgaggatggtctgaacagtggtgatttccatctcgccggtggtcgggtttttaatttccgacaccacaagcgggatattcacttttgtccatttgttcaccagcgcacccatgacaaacagaccgaggattgacgccccctctgtcagtttctgcaggaagccgccgcccatatcctgaacaatatccaggccttttttgtagccgtaagccacgccgtagtaacgggttgccaggcggaccaggttaaacaggaagaagaacagtaacggcccgagcaggctgccggtcatggcaatccccgcaccgagggcggcaaagaccggacgcacggtaccccagaaaatcgggtcaccgacaccggccagcggccccatcagaccgactttgataccgttgatggcaccgtcgtcgatagccgcaccattagcacgctgctcttccatcgcacaggttacaccgaggataggtgcagccatatacgggtgggtgttaaagaactccatatggcgtttgatagcctgtctgcgttcttcattattttccggataaagacggcggatcaccggtaccatggagaaggcgtagcccattgcctgcatacgttcaaagttccatgaaccctgaaacaggtttgagcggatgaagacaccccggatatcgctctttcttaactgttttctgccggttacgttgcttgtagtatcaaccatgttgctcaccttcttagtctaactcgttatccaggtcgtttttgctgccggcagcgacaacgacttccgatttgttgtatttcggactgagctgaatatacagcacagccataaccgcaccgatgacacccagcgcaaccaggttgaaatcagtaaatgccgcggtaacgaaacccagatagaagaatggcatcaggtagccggcacgcatcatgttgataaccatcgcgtaaccgaccacaacaatcatgcccccggcgatattcagaccgttggtgacccagtcaggaatcgagtcaagcatttcacggacaacatcagtaccgacagacacggccacaataaccgccggaatagcgatacgcattgcctgtaacagcagggcaccgacgtggatcatccccagcgcggtgagatttcccttatcagccgcacggtcacccatgtgctggaaggccacggtgatggtacggacgataatggtcagcacctgaccggcagccgccagcggaatagccagcgcgataccggcaccgatgttctggcccccggcgataaccaggatagtggaaatgatggatgccagcgccgcatccggtgccactgccgcaccgatgttcatccagccgagtgcgatcatttccagcgtaccgccgatcatgatcccggttttcatatcacccagtacgatccccatcagcgtacaggcgaccagcgggcggtggaactggaattcatcgaggattgaccccatacctgcaacacaggcaacgatgaagaccaggacgatttgtacaacggaaagttccattgtgtttctcctttaaccagtcattttgcagacaacaaattttgtattgagtaatgggtcaaattaactttcagctttgctgattaaatccatcatttttatttttgaatcggtggagactttgcggacttccagctcgatgttgcggtcattcagcgctttgaatgccacgatatcgttttcatcgatagaaaccgcattgttaacctgttttttaccttcgtggaaggccatcccgccgatgttgactgatttaatctccacaccgtcttccaccaggcgcagaacatctgccgggttggtaaacaggagcatgcagcggtcattggcgtatttcgggttattccagacacgcaccattttcgccacatccaccacgtgcgcggttacacccggaggagcaacctgcttgagcagtgttgagcggacggtgtctttggcaacctcgtcactgacgacaataatgcgtttgacgttggtttctttggtccagcgggtggcgacctggccgtggatcagacggtcatcgatacgggcgagagcgatagtcatgtgtccgcccgggcctgccggtgccgccggctgtgcggccggttttggtgcaggtgccgctttcggagctggttcgtcctgtgctttcagggcgcggatcccttcacggccggtttccagcgccaccgcaaccagttcctgcaatgacggattatcatcacggcacataaaggtctcgaccagcatcggcacgttaacgcctgtgactatctcataattgctgttgccgcctgcggcctgatcctgctcagtcacaatacggtttgctgcgttgaacgggctgccgccccaggtatcaacgaggaataataccccgtcagcggttgataaaccgggcagcttctcattgtacttcgcatatagtgtgtcggcattttcccccggtacgaaatcgatgaaggagacgttctcctgttcaccgatcagcatttccgtcgtgcgcagtaactgctcagcggctttgccgtgggtgccaatcataatggctatactcacctctgttcccccttaacatcagtcaggatggttcttgtgtattacacagaatcttttatgggtcaggaaaaaaccgtaagactccggtgtaaagatagtctcaggcccgtgataccgctaattatttacgtttaaacagcgataattaatttcggggcactaattaaatagaaggttaacattctatgaaggtaaaaaaacttgctttccgtcagaaaacaacaaaacagaaacattaaacacttaattatagttaattattgtgttgaatgagctatttgtcagagtgatgaggtgttgtttgattattttacagagttatatactatgatattttacatattataaacatttacatctgaaaatatcacaaattgattgaaaagtgaccggtgctgatgcgcttcaggtaaaaaatatccctgcaatgttgcagggatattaatgtcagcgaattatgttttgtgagttaaatcacgaaatcagtcgcactgaaccttgattgcaagaccgccgcgtgatgtttcacggtatttggcgttcatgtctttcccggtttcatacatggtttcgatgactttatcgagagaaacgcgcggtgcgctggtacggcgcatagccatacgggcggcgttgatcgctttcactgaggcaatcgcgttacgttcgatgcacggtacctgaacctgaccggcaaccgggtcacaggttaagcccaggttgtgttccataccgatttcagcggccacacagacctgttccgggctgccgccgaggatttcagtcagaccggctgccgccattgagcaggccacaccgacttcgccctggcaaccaacttccgcaccggagatagacgcgttcattttgtacagaatgccgaccgcgccgcaggcgaggaagtagcggagataggtttccggtgtcactttctcgatgcagtgatcataatacgccagtaccgcagggacgatcccgcaggcaccgtttgtcggtgcggtaaccacacggccgcccgctgcgttttcttcgttgacagccagagcaaacatattgaccaggtcaaccacgttcatcgggtctttggagagtttaccggcggagttgatcaggcggttcagtgcagcggcacggcgcggcacacgcagcggccccggcagaatgccttcggtttccagaccgtgagcgatacagtcagtcatggttttgtagacatcggcgaaatacgcgtcgatctcttcacggctgtgcatatccagctcatttttcagcatcagggaggagacggaaagcccggtctgatgacagtgattcagcagctcttccgctgaggcatacgggtaggataccggtgtttcgttggcgttatcctgaccgaaatgctcggcatcgacgataaacccgccgccgatggagtaataggttttggtgtacagctcttcatcaccggcaaatgcggtgatactcatgccgttttcgtgcagcggcaggttaccggtgtggaaattcatgccgccttcacgcgggaagtccacagtctgctgaccattggccagggacagacgctcagtctcttcgacatcgcggataaaaccggcgataccatcgatatcgacagttgccggcaagttaccggccagacccataatgatagcgatatcggtatggtgacctttcccggttaaggagagtgatccgtagacatcaacagaaacgcgggtcacgcgggaaatcagacctttttcaaccaactcatcagcaaactgcttcccggctttcatcggccctacggtgtgggagctggaaggaccaatccccactttaaacatgtcaaaaacgctaatcacgtcagactccttaaaaaacaatgtaatagtgatttatcgtaaagcgcgttactttactgttatttgctcacacggataaagtagtttatcgcatttttcactgcggaacagcgctttcggataaaattcgggcatacctgatgaaaaaaagcagggggaaatagggcagaagtgtgaattcggttacaaatcaatcatttttcacttgcgttgcgaggcgatataaaatacccgctgttaacccccaaatcatccgtccctcatataagtaaaaatagaggcggcgctccacagtattgcgggtcatatcaatgtagcggtagcggctcagatcgagggcggcatccagcggcagctcaaaaatatctgacacttcctgcgggttaccggccagaggcagatatggcggaataatcccgaccaccggggtgacccggaagccggtcacactgtccaccggtgccatttgtcccagtacctgcacggcctgtggcggaatgccgacttcctcacgcgcttcgcgcagtgcggtggcgatgggggaaatctcgcccggatctgccgcgccgccgggcagggcaatctgtcccggatgagagcgcagcgataccgcccgttgtgtcagcaggatccctggccgggctttattggtgataggcagcaaaacggcggcccggcgatcccgctcaccggcaatttctgcttcggaagggcgggttaactgaaaccggggaataaagcgctcaagcggactcataatattttctccggcagtaccgtcagtatgcggcccagtttatcgaacgtttcctggtattcatctgcggcacggctgtctgcgacaatcccgccgcctgcccggcaataaaggtgattattttccgcaatcagggttctgatcgcgatattggtatccatggtgccacaggcgctgatataaccgacggagccgcaataggtgtggcggcggacaggttcgagctcttcaataatttccatcgcgcggattttcggcgcaccggtaatcgaaccgcccgggaagcaggcgcgcagtaactgtgctgcccggcatgccgccggtaactgtgcggtgatggtgctgaccagatgccagactgccgggaacggctcgaccgcaaacagtgacggcacactgaccgagccgggaagtgccacccggccgatatcattgcgcatcagatccacaatcatcaggttttccgagcgatctttctctgacgcggccagcgcctgtttttctgcttcgtcggcctgcggatcagcgggatgacgcggacgggtgcctttaatcgggcgggtttctgcggtgccgtctttcagccacagaaagcgctccggtgaaaccgacagaatggcggcttccggcagacggagaaacgcggaaaacggtgcccggttttcgtcattcagccgcagaaacgcctgccattcatccccctcatacggggcggaaaaaccctgtgacagattgacctgataacaatcaccggcctgcagatagttatgaatacgggcaattttttcgtgatattccgcttcggtcatatcggactgccagcggccggtcagggcgaaaggcagactctccggtgccttctgattctccagccagtgcagacgcgcggcgggatcggtataggtaattaatgtggcgcagcggcgctggtggtcaacaatcaccgcccagtcgtaaatgcctatggccatatccggcaccgacagctcattacgtgccagtgacggcagagactcggtacgccgcccgagatcatagccccataatcccatcgcgccgcccgcaaacggatagtcatcgtgcggttgcggatccagtccgcactgtgtcagcgccgcatccagtaactgaaacggatcatcattttgacggaggcgctgcccccggctatcttcagttaaggtctcatcgcctctggtggtgagtgtcatcaggggatcggcggtcagaatatcaaagcggttatgctgatgctgagcactgccggagtgcagcagcatggcccacggctgatgcgacagcggggcaaacagggtcagggcgagaccgggatgataatcaagtggtgtcagtacaggtacggaatgtgatgtcataattcagtctgtcagtaatctgtgtccggaaactgccggttatcttatcggaaaacaggcggatgcgtcccgccatctttatgagtataatgtgttttttactgaaatgttatagaaggtgattatgtttaccggaatgcccgcgttaagtcatgaagaacagcaggccgcagttgagcggatccacaccctgatgcagcaaggtatgagcagtggtgaggctatcgcacaggtcgcggcggagttacgcgaacggcatcacggcggtgagcagatccgcgcgctgtttgatgaggaagatgacgacagcgaagaatagaaacaaatatttaacaagtgtcacaatttcctgataataaatatgttactttgcagcaataagcattaagtgaaatttaattaagcgctattgtataaaaatgacatttagtctctttcgggattaaaacaggaggttttatgaaggcaatgaatctgttcacccgtaccggattggcaggtgcaggtattctgctggcattcaccgtcagcgcacaggctccggccacggcggaagtcaaaaatgagcgtatggtgactttcccggcgtgtgaatcgctgaataaagatcagatagcggcacaggtaaaatatgactttgtgcagagccgctacccgcgctggcaggatgataaagcgctgctgggcagcaagccggttgcctgggtgaatgtggcggaagtgactgagaaagacggtaattacagtgtgccgctggttgtgcgcggctcgaaaaaacaggtcagttacaccgttgatatcaattgtgcggcgaagaccatgacatacagtctgccgcagtaatgatactggctgttaaaccgtaaaaaggcgtgctcaggcacgcctttattatattcagcgtttggcattcggctcatacggcaggcgggaaagcccggcactgcgctggcggtaaaacaccagacgttcggcaaaataggcgcgcagggattcaggcagtgtctgctgcacctgctcggcgatcaccggcatgttatagcgctctttaaaggcgacaccggatgcggctaagtccgcattgattttatccatctcttcctggctgagttcggcaagattataactcacgatatgctcctgtaacggctgacggccttaacttaactgagctgccgccggactgcaagcccggattgacgtgtattcggcccctctgtaaagagaatgcgattaattctgattatccttacaaaatcattttgttttcaatatgttgtgaatttattaaatagcacttttcttcccggcaggagtgtgcataatgaccgcagatgatgaaataaacgactgacaggagcctgtaaatgttaaagccggatatggtcaaccaactgaatgcccagctgaatcttgaattttattcctcaaatttatatctgcagatgagcgcatggtgtgctgataaaggctacgaaggtgctgccgcatttctgaaagcgcacgcagcggaagaaatggagcatatgcagcgcctgtttaattacctcagcgataccggcgcgatgccgttgctcggggccattgatgcaccgccgtcagaattcagttcagtgagtgatattttcaccctgacgctggaacatgaaaaattaattactgatgaaattaataagctggttcatgctgcgctgacctcacaggattattccacctttaacttcctgcagtggtatgtggctgagcagcacgaagaagaaaaactgtttaaatctgtgctggataaattcgcaatggtgggtgacagcggcaaatcgttgttcctgctggataaagatctgggccgtatggcaagcgaaccatccgcaagctgatcatttttaacagcattattatttataatataaccacacaattatcataatatactgatatttgtgtggtttttatttgtgttgccgatcacaaaaaacactctccggcctgtgaaggtttccgcaatgcccccggttgcgctagtatgtcccgcataattacatcacctgcaaaaatgaggcataccattatgttaaccaacctgaccgcgcactggcgcaaattatctgctgttgttgttttatttgtcggtttatccggccagcaggcgttcgctcacgctcatgtcaaaacgctggttccggcggcagatgcggcagtgaccggttcaccggaaaatatctctctggatttttcggaagggattgaactgaaattcagtaaaatcagcgtgaaagatgcacagaataaacctgttgcagccggaaaaccggaactggcggaaggaaatgatacccgtctgatcctgccgctgacagaaacgctgccagccggtatctatcacgttgaatggaaagtggtttctgtcgacgggcacaaaaccaatggtgactatcagtttacggtaaaataaaccggttatggaactgacaccggaagcgctgctgattatctgccgcttcattcattttacggccgtgatgctccttgcgggttgcggcctgttctctgttctgctgcccggcgaccgggtggcactgctgctacgggcccgcctgcgttctaccgcctgcagtgcagctgtgtttacggtcctgacaacgttcctctggctgctgttacaggcggcactgatgggggacggctgggcagatatgcaggatccggatattatcctcgcggtgctttccacttctttcggggagatctggcgctggcagctggtgcttgccgttattctctgcggcggactgctgctgccgtccggacgggtgcaaagcagtctgtttctgatctgtgcagcggcgatgctggcgctgcacgcctttactggccacggcatgctgcacagcggctggacagggcggctctatcagtttaatcaggttgttcacctgctcagtgccgcttactggttcggtggattgtggccgttcctggtttgtcttctgatcctgctgcggcgtgacacactcgcgcaggggctgccgaaagaagtggtggccaccctgatccgtttttcaaacctggggcattttgctgtctttctggtactggcaaccggccttatcagcactatgctgctgttgccggactggccgcagtggagcggcagtgattatcaggcactgttatggctgaaaacagggctggtgctgacgatggtgctgctggcggtgataaaccgttatgcggtggtaccgaaaatcgcacaatcaggccgcttccgcctgttgatgattaacagctgggttgagataattctcggcacactggccattttaatggtggcgatttttgcaacttatcagcctgtataactccggacaggctgacaaccgggacacactatgaagaaagctctggcattaattcctcttttactggcaggtgcggcacaggctgcgccgctgaaaaccatcagcaagtttgagtttggtgaaaagtggccgtttacccgtgaggaagtgatgatcaactgccgggacggaaatgcactgtgggtgattaatccgtccacactgatgtcgtatccgctgaatgatgtggcggcacaacaggcaaaagagcagaaaataaaggtgactgacctctcagttatcacattaaaacaaaccggagacgcggaaaaaggcatggatcttaccccgatcattgaggctgccggtgcgctgtgtggtgataaataacacatattaattatgaaatttaacgattaatattcggttattaattaaccagctgaaatataagccatttaaatcagatatatgttaacgatttgataaataaatattttgcatatgtaaccaaaccgactaatcttaatcatgtaggttgtacgatattttcaatggcaattttagcgcacggctcgctatgagcctttttccctggaccggatagaggactttatccggtctcttttttattcccgccgttcttctccctcattttcacgaaaaatgcgaaaggatttgtaataatcctatagggctgccccgttatttgatataaattaaacattactttaaccggataattaacccgtaactgtagtgtgacacatgaataaactcgcgttttatcaggatttaacccgccgtttaacatcgcttatcagtgatgagaaagatgtcatcgcgacactgtccaatgtcagtgccgtcctttttgacgagctggaacagataaactgggccggattctatctccttcagggggataccctcgtgctggggccgttccaggggaaagtggcctgtgtccgcattccggttggtcgtggtgtctgcggaactgcggttgctcaggggcaggttatccgtgtggatgatgtgcatgatttcgccggacatattgcctgtgattcggccagtaactcagaaatagtgttgccgctcgtggtaaatggtcagattatcggcgtactggatatcgacagcccggtttttaatcgttttgataataatgatgaaattggtctcaaagccttgaatgacgtgctctgcgcacatctggcaacgtgctttatgccgaaatatcgtgaaatgatcgcaagttaggcctccgggagcatagcatttgtctgtaacactattataatgacgcctgttcatgcctgctggttggcaaagcaccgttgtaatcaggaaaattcatggaaaatcaacccaagttgaatagcagtaaagaaattatttcatttttggctcagcgcttcccgcaatgctttgtggcagaaggcgaagcccgcccgctgaaaatcggcatcttccgcgatatcgtcagtcgtatcactgaagaagatggtatcagtaaaacacagttacgtaccgcactgcggatgtacacctccagctggcgctatctgtacggcgtcaaagaaggggccaaacgtgttgacctggatggtaacgattgcggcgatctggaagcggaacatgttgaacatgcccgtacccagttagcggaagcgaaagccagagtccaggcgcagcgcgcgcagaaacgtgagcaggacggtgagaaaaaaccgcgtccggcagataaagccgccgctgactcccgccgcagccgtacggataagcctaaagcgccgcgtaccggtaaagctccgtcgccgaaatccgctgatgcaccacgtaaaccacgtgcaccacgtcccgaatctcagtctgaactgacaccaatcactgatattcaggcactgaaggtggggcagcaactgaaggtgacagtcggttccggcgttatggatgcgcaggttctcgagatcaccaaagacggtgtacgtgttcagctgccttcagggttggcaatgatcgtgcgtgcggaacacttaaaattctgatacggagtcaaccgaggcatgaacaaatttttacccctggcgttgctcatcggatttagtttaaccggcaatacgatggcaaaaaccggcacctctgtgctgccggatgtcaaaatcagccagctgccggatactcagcaggcaccggagcactctacggtcagtgagcgtgtgacgtcccggtttctgcattcccattaccgtcagtttcagctggacggcgaattttcagcgaaaattctggagcgttatctgaatctgctggattacagccataacgtctttttggcgtctgatgtggcgaaattcagtaagaacaaagcagatgtcggcaattatctccgcaaaggggaattacagccgttatacgatctgtttaatctgtcacaaaaacgccgttttgagcgctttcagtacgcgctgaaccgcctgaagcagccgatgaattttgacggcgacgatgtcattgatgtggaccggagcaaagcaccgtggccgcagacagaagccgagctggataaactgtgggatgccaaagtcaagtatgactggctgaccctgaaactgtccggcaaagatgacaatgaaatcaaagaaaccctcaccaagcgctatacctatgctctgaagcgtctgacacagacgaaaagtgaggatgttttccagctgatcatgaccgcgtttgcccgcgagatcgatcctcacaccagttatctctccccgcgcaataccgagcagtttaactcagaaatgagcctgtctctggaaggcattggtgccgtgctgcggatggatgatgattacactgtgattaattcactggtcgccggtggtcctgcgctgaagagcaaggaactggcggtcggggataaaattctggctgttggtcagaccggcaagccgatggtggatgtggtcggctggcgcctggatgatgtggtatcacaaatcaaaggtgccaaaggcagtaaagtccgcctggaagtgctgggtgataccaaaggggccaaaccacgtattgtgaccctgacccgtgagcagatccgtctggaagacagagcggtgaaaatgaccatcaaacaggtcggcgaccagaaagtcgcagtgctcaatattccgggtttctatgtgggtctgaccaatgacaccaaaacccagctgcagaaactggccaaagagaaagtggatgcggtgattatcgatctgcgcggtaacggcggcggtgcactgacagaagcggttgatctgtccggcctgtttatcaccagtggtccggtggtgcaggtgcgggataacaacggccgtgtccgtgaagatgcggacagcgatgatgttatctactacaaaggtccgctggtggtgatggttgaccgcctgagcgcatccgcgtctgagattttcgcagcagccatgcaggattacggccgtgcactgattgtcggtgaaccgaccttcggtaaaggtactgtgcagcagcatcgccctgtcagccgtatttatgaccagatgctgcgccctgaatggccggatctgggctctgtgcaatatactatccagaaattctaccgtattaacggcggcagtacccagcgtaaaggggtaacgccggatatcattatgccgaccggctttgataacgacgatatcggtgaaagctttgaggataatgcattaccgtgggacagcattgccccggcgcagtattcacagacagatattatccgcaaagcggtacctgaactgactcagaaatatcaggaacgttcaaaaaccgatccggaattcgcttatatttacgaagacctggcacggtttaaagccaataaaccgactcagtatattatttccctgaattacgcgaagcgtgataaagaagataaagagctggaagggattaagctgaaacggattaatgaacgttatgcccgtgaaggcaagaaaccgctggcaaatctcgaggcactgccgaaagattatgaagggccggacgcgtatcttgatgaaaccgttaagattgcagcagatctggcaaaagtgccggatatcagtaagagtgcgcaataacctgttattttacggaataacatcaataaaaaaatcgacagcattcaggctgtcgattttttttgtgccgcataaacacagcggcaccggcaattcgtcgcgtattaattaaaagaagcgcggtacagaaattgtcataactgcagtggtaatacgatcaaaagttgtttttgtggatttaattaatttagccataacaattcctccattatttctgaaaataatgttcaatactcaggtgaacgtgtttatctgttaatctaaactggtacagttaatgtgctgtatcgttgggatgtactttactcattagtgtgagttcaatcaagttttcactcaaaagaagttgagtgcaataaaatcaattttaactcataaaatatacgattttgtaaagaaaacggtacacctgacagtgatacacggaaaataaaggaattctgatgatatttcgtacacaattcagcacggtactgggtgaaatgtcggccgcggcaacagagcagggtgtttgttttctggaatttacagaagacaaccgccgtgaagataccttacagctggtttcttcccggctgaaaatggcggtaacagacggaaatcatcctcaactggcgttgctggagtcacaactgcaggactattttgccggtaaacggatgatatttaccgttccgctggtgctgccgggaacgccttttcagcaaaaagtctgggatgcattattgtctgtgccgtttggcagcaccgttacttacagtatgctggcggtgtcattatcctcaccgcgcgctgtccgggctgtcgggcgggccaacgggatgaatccggtttccgtgctggtaccgtgtcaccgcgttaccggcaaaaacggcgaactgaccggctatgcaggaggaacggaccgcaaagcctggttactggctcatgaaaaacaggttaaaggagcatcagcatgattttctgtaaacgggtttatgatgaggtcgcggaaagtgacggttaccgggtactggttgaccggttgtggccgcgcggaattaaaaaaaccgatctgaattacgatgaatggaataaggatgttgcgccggatacggaattacgcaagtggttccacgctaacagtgatcagtttccggagtttgaacggcgttaccgtgaagagctggagagcaggccgcaaagctggcaaccgctggtggccagagcggtgcagggcaatctgacactgttgtttgcggcaaaagataaagaacataaccaggctaaagtgctgaaggcatttctggaagaaaaattatcctgatgacatatcggcggcctgactgacgcgcaggtacaggcagacaggcgaacggaaaacgtaagcgccacggatggcgcgatccgagcgtacagggatgtatttacagcgttttttcgttctgtctgcctgtaccggaagcgtcacagcacaaaaaatcccggcgaaccgggatttttcagcaaagaagataattcagcgtatcagctcaggatcttattctctgccaggctcagggcgaaataactgaaaattaaatctgccccggcacgtttgatggagccgagagtctccagtgcaacgcgggtttcatcaatagcaccggcctgtgcagccagtttgatcatcgcgtattcaccgctcacctgataggccgccagcggcagatttgaacgctcgcgcacatcgcgcagaatatccagataagctccggccggtttcaccatcagcatatccgcaccttcctgctcatcaatcagggattcacggatagcctcgcggcggttcatcggatccatctgataggttttgcggtcgcctttcaggcaggaaccggctgcatcacggaacgggccgtaaagggcagaggcgaatttggtggagtaggacacaatcccggtctgatggaacccggcggcatccagtgccagacggatagcccgtacctggccgtcctgggctgcggaaggcgcgataaaatcagcccctgcctgtgcggcaaccactgcctgtaacccgaggttatgcagggtttcgtcgttatcgaccacgccgtcatgcaccacaccgcagtgcccgtggctggtgtattcacagaaacaggtatcggacatcactaccatttcaggcacggtctctttgcagatacgggacatccgcgtaaccagaccatcttccgcccaggcatcactgccggttgcatccagatgatgtgaaacaccgaaagtcatgacggatttgataccggctttggcgatccgctcgatttcgtaagcgaggcgcttttccggaatgcgcataacgccgggcatgctgtcgatggctttatagtcatcagcgccttcttcgacaaaaatcggtaacgcgagatcattgaggcttaatgaggtttcccggaacagatcacgcatctgcggggtctgacgaattcttctgagacgctggatgtcatgttgcataacgacagttgctccttatttcacaaaaaataatgcggtcagtataaacctttcagaggaggatggggtacaggcagaaaaaaataaggctccgcagagggagcctgaaaacgatgtgcgtttatcttcagaatataatacgggcgattttattgagctctgagataaaacgtctgatattttttattgcaggtaacataattgcgttcttgtttattgcgttctcacaattcgatgacataactttagcactttgttgatgagtgtcaatctttctcacaaattaaatttaacatttaaactaaatttgatttgaaccgatacagctcaaaaatgctcagtctgtccgtcagagacggttacggtaaaatgcgaccacacagaaggacgcggtgacgttgtctaactcttttaagaagcgggctaaaaatcgcatagtgagtgtccttttattgttgtgatctgtatctcaaaattgcccctttttgtgataacagtcaatatttaaaatccagaaaaatgattttcagtcaaaacaggtgtgaatcccgcgtatcagcagatgtttccggtgttttaacaacggattaacgggataaaacagcattttatggtatttgttaaatacccggatttattcacctgatttttagcagcataacaggcagtatgtgagataacggaaattaaaaattgtctacactctaagttaaagactgaaaaacaggataaacatggattcattactcttctggggttttgtgttagtggcgctcattgttgtgacgccgtttattgctgttgcggcgctgcggcgcacaacgctgctgaagttgcaggtcagtgttctgacggaggaaacggaatcactgcgccgcgaactggatgccctgaccggcggtcagccggtagcggaggccaccgttcaggccgctgcgctgtctgaagtgatcccgctgcagccggagccggaagtgcagtatgaaccggtgccggaacctgatcctgtttctgaaccggaacccgtcatcgcggcggcggcaatgccgttcccggcggatactgcagcggcggagcgcaaaagcccggcggccaatattctcgaatggctgcttaacggcaatctcccggccaaaatcggtattctgctgctgtttatcggcctctcctatctgctgaaattcagtatcgaaaataatatcctgacaccggaagtccgtctgatcggcgcggcaatcctgtcagtaacactctttgttgtcggctggtgtgtccgccataaaaaccggctgtacagcctgattgttcagggcggcagcctcggtgcgttttatatcacgatatttgccgcctataagctttatgagttcctgccgctggcctttgcactgccgctgatggtggttatctgcctggcatctgttttctttgcggtgatacagaacgcggtcagcctggcggtcctggctgtgatcggcggctatgcggcaccggtgctgctctccaccggcagcggtaactatatcgcgctgttctcctattatctgatgctttccgtctccattctgatcatgaactactggcagggctggcgggtgctgaatatcgccggtttcgcctttacctttgtggtcggtgtgatctggggcgtggataactatcagccggagtattacctgaactgtcagatcttcattattctgaatctggtggtctacgggctgctgacgcagcaatatgcacggcatcatgtccggacagatgacgggcgaaaacagctgatggtggactcggtgctgctgtttgcgccgccggtgctggcgttttccctgcaatatgccattacggagccgttctatctcggtaccgcaatgtcatcgctggccttcgggctgatttatctgctgctggcggtggtcagtctgcgtcgcttccgtgctgacgggcagcgcctgtcgctcggtttcctgctgctcagtatcggctttatctcgctggcggtaccgctggcactgtcgccgcagtggacatccgtggcctggacgattgaagggctggcgatactgtggttcgcctgtctgcaaaaacagcggattgtcggctggagtgccaccgggctggtgctgctcgggtttgcgtctctgctctacagcatggactttatttattggtcagaacaaagcgcctggatgtatatcttccagtggggcgggttgctggttgccggggcgcttcatcaccattttcgtctgatgaatcgcagcaaactgatttccggactgctgattatcccggccatgatcacctggctctcgtggctgtggatgctgccgtggttatcaccggcgggtgaattactgtccggtgaggaatatgtgctgaccgggcttgtgatctcggtctggagctggttcttcctggcgcgcaaagtgcagtggactcagctgtattactgcatcagtgcgctgtggatagtgagcctgctgatactgtgtgactatatccttaccggaacacatgcggccggttcgctgtacggcggctttatctggttgctggttatcggcagtatgatcacctttatccggctgctgccggaacaggcaccgcgcattgtcagcaacctgatgcacggcgcatcactctggaccgtcatcggcctggtcgccgccgaagtgatgtgggcagaaatgcagctgccgtggggtatggaagagtggggttactttattgccatgctgtcggcgtgcggcgtgattttcgtgctttacgccatgcagcacctgcaccggccgccgatggacaatcatgccgcgctgtactggcagagtgcctatccactggctgtgttactggggctggcgctgtttaccggaaatatgcaggatggtcagctgtcgctctggcagtatgtgccgctgctgaacccgctggatgaagccgggctgttcgggcttgctgcactgtggtgtctgcgtgatgcgctgatacggaccacaccggcaatgcatttccgggcagatgtggtgcgcggcctgggtattgccatcgctgtgcttggtatctggtgggcgaacggtattctgatccgcgccctggccttttttgtggacggcaccacatggacaaccgtcgggctgctgcagtcccgtcttattcagaccacgctggcgattgtctgggcactgacggccgtgatcctgatgacctccgcaacccgccggcataaacgccatctgtggctggccggggcggccgtctttgccgtggtgattattaaactctttgtggttgatatgaaccagagcagcgggcttgccagagccggtgcatttatcggggtggcactgctgatactggttgtgggatatttctcgcctttaccgccgaaaacaggcactgacatacagaataataaggaagataactgatgatcacaggtaaaaaggcggcactgcgccgcaaatggcataccggggctgtgctcctggcggcggtgctgacatcggtgacgaccctttcgcgggcggataccccggcgaagacactgaatgattttaatcagggggcggaattacagctccgggcggagaatgccccattttaccggctgacagtcccggataatgtctggctcaacagtgcctggccggatctgcgggatatccgtatctttgacagctccggtacgccggtgccgatgtcactgacggcggcgaagcaggtacaagatgaaagcgcgcgtgttcgcttcgttatttatccgctgtcacaaagccggacggaagagcaggatggcaaccgcaaaatccgcctgaaagcggataacggtacagaactgacgatttacaatgatagtgcggacagcctggcgcgtccgtccaccgcgacttacctgctggtgccggataacaaacagcagctcccgctgccgctgcgggaagtcactctgaactggccgcagcagaccggtaatatgcaggccaaagcctcactgttcagcagtgatgacaaacagaactggtcgccggtgatcctcgatgtgccgctgatggatctgaaatccggtgaggatgcactgctggcgcagcagataaaaattccgggctatatcagcggtgatgaaagcagggcgaaatactggctgctttccgtgaccggagataacaatcaggcaccaccgcagatcaccaccgcagaagggatgagttcccggactgtggagcgccgtgaggtgaaccgttttgattttgtgcctgcggaggacactgacggcagtatgatttacagtctgccgaatacccagagtctcagccgtctggattttcatattgaccgggaaaatacggtgctgccggtacggatagaataccggagtggtacagaagggaactggctgccgctggataataaagtgctttattcactggtgtcggatgatgcggaaaaccgcaacagtaacatccggctgaatgatctgccggtccgccaggtcagactgaccgcgattaacagcagctggcgcgggacaccaccgaaggtcaccggggttaaatatgcacaatatctgaccttcaacgcccagggctctgcgccgtatctgctggtatggggggcgcatgatgccaatgcggtatttttaccgctgtcccagcttctgccgggcaataatctgaatagtcaggatgcgattccgcgggctgatgtgtcagaaaaagtggtcacactgggcggggaagcgaagttactgcctgaaccggaagccccgccgccgtttgcctggaaaacctggctgttatggggtgtgctggtggctggtgtggtaatactcggattatttgctgtccgcctgctgaaagaaatgaaaacggaacagaaataaccgtacagcataaaaaaagtccgcacgttgtataacagcgtgcggacagaaacgaaaataaaaaagaaagggtatttagtacaggaacattatcctgacacaaacagcggcctctctctttagcgattcgttgcattatccccggacagcattaattgccaggccggaaattatttccggtactcagttttaatctgggcaatggtatttttaaaggtacctgacagatgctcatcatcaatttcgctgatctggcgttccatattgacgataatacggccggcatccgcctgacccaccgccttcagtaaatatgtcaccagtgcttttaagcaggtcacttccgcagccagtgtttcagtatcgttttcagttttaaatgcgttattcatggttaacctcaaccgttatatttatcagtcccggatatatcagccgcaaagaataccagatctgcccgtcactgctctaccttcttttttattttcccgttatgctgataaacagggtgcgttcattatccgctgaaaaaggcaaaataatcagatgaatattattgatatcaatgccataacccgcgattacccggtattaaaaaggccggatccgcaggacagccataaaggtacattcggtaccctcgggatcaccggcggggctgccggaatgaccggtgcgattattctggccggatgcgccgcactgaaaaccgggtgcggcaaagtgatcctgggatttaatcagccgcagttgccggtgccgtttgttgagaatgcaccggagctgatgctgcgtactgcccgcgcccttgcggatgacccggcgctgaccgcacaggttaccggtccgggactggggcagagtacagagagccgggtactggcggaagcggcatttatgcagaccggtaaaccacaggtgctggatgcggatgcactgaatattctggccgccacgccgggtatcgcgctggatgataactgtgtgataaccccgcatccgcaggaagccgcccgtctgctgcataccaccgtggcggatattcaggcggatcgcccggcggcagtgctggcgctggcagctcagtatcactgctgggcggtgctgaaagggcaccgcagcctgattgcctcaccggacggtgagctatggtgtaatcacagtggtaaccgcgggctggcgactgccggcagcggggatgtgctatccggtattatcggtagtctgctggcacaacggctgccggtgcaggaagcggtttgtggcggggtctggctgcacggcgcggcggcagatgaatgtgtggccgccggtatcggccctgccggattaactgctcatgaaattattgattatgtgcggttaatccgtaaccgcctgataacagaaatgccgggtaataagagttaacggtatcaatctcacagatatttttcgctctgtttaatatagtgacaatatatcgcatgatttattcaaggaggcagtatgtataatacaattttggttcctatcgatatttcagaagaagaactgaccagtaaggctgtccgccatgcactctatctggcgaaagaaacaggggctaagctgcatattgtccatgtcctgccgatctcatccgcgattattaatgcgtatgcgctgggttatatggagataaaagataaagcgaccattaaagcggaagaagatcttcatatgctgatggattctattgatctgccgccggagcgtcttgcttacacgattacgttcggttcgccgcgtgatgaaattatccaggcagcggaagaggtaaaagccgatattattgttatcggctcccgccgtccgaatatctccactcatctgctgggctcgactgccggcggtgttgtccgttacgcaccggtttcagtaatggttgtccgctgatgtaatctgtatccggtggtatcgatgatgccaccggtattttttgttcttcctgccgtcatccccgctactcataaaagaatcattctcttcttgctggttatctgcctgtctcatacgaaaatacagaggaataatacgtggtatagccggatttttttccggatagaaaacacaaaatcataaaaaggcagtgaaattttatgatgcccggcacggcggtttcctgtttattgcctatacttaattcaaatacacattgaactgacaatgagggatggtatgtataaaacgatattagttcctattgatgtgacagaagatgtactgacgagtaatgccctgaaacacgcgatttatctggcaaagatgtcacaggcgaaactgatgttgtttcactctgtaccggatatttcgaaattctcaataagctataattaccactatgaattgctgaactcatttgcggaaaaagccgttgcccgttcaaaagatgagttaaaagcgattgccgaaaaagtggatttaccggcagagcaggtcagttattttgtggattacggcacgccgagagataaagtgctggcaaaagcaaaagagatccatgctgatttgattgttgtcggttcgcgtcacccgagtatttcaacccatctgctggggtcaaccgcctccgggattgtggcacatgcgcaggtttccgtactggttgtccgctgaatattaagtataacgataaaaaccaaaaggtccgcaaacgcggacctttttcgtgaaaacagaattactgtttcgccatcgatgctttgaattccttcagtgcatcaaggccctgctgacacgccatgtcctgagtctcttccggtacagatttaatctgtgtttttgcggtttccagctgctgtttcatggcagtgatctgtgcagtcgcatcagcatcacctttggcttcctgctctgccagtttgaccatttcgtcgatttcagtgaaatattcatcacagactttgctggcattggcagcaaaagcagtaacagagaacaggcatcccagggtaattagtgtcagctttttcattatagaccttatgttgtaggcaggaacggatatgaataattaatcaatatgccccgaaatatcatggaatatatataagaataagatgaatctcagaataattacttactttatgcataagaataacacagcccggcacctgcgggcagataatgcgcaatttgtgctgatgcaattgaaccgcattcttatttgttgacaggtttctgccggaataataatgtaccgataaatacaaaaaggattacggagttattatgtcagcagttaattttgttcatatggatacaggcgtcttcccggtggtgataatgcagtcattcccggaaaatatggcacaaacagaacagtgggtgaaagagctggatgcgctgctggacaagcagacaccattcgcattaatttacccgccgaaagacgggccggaaaagccggatacacaggaagatatggatgcgcgtaagtatgtccgccgctggctgaaaaccggaaaagagaaaatggcggcatattgcagtgtgatgatcctgaccgtcaatcaggaaaccggggacaaagcggagctggagaaattcgcgccgatggccggtgcagtctacggtgtgccggtgtttgttgctgatgacatggcagcggcccgggaaaaggcggcagaagtgaccgcctgaaggcagatgttaatgataaccgctgttcattggggtgttaatgtgtggcggaggtaacaggccgttatctccacagataacggcagctgtttttcaataaattccgccgttggcttgttatgacgatgactgaaaaccggcagatacaggtcggctttcagcatttccagaaaacgggcggcaacggccagtaatgtgtcctcagacgcggtgatgtcgggcagtgctttcagtccggccgccagctgttgtgcggcacgcagcggaccggcgcggtaaaattgttcactgatttgcgggaagcgttgtgattccgccagaatcagctgatataagccgagtgactgcgggtggacaatactgtacaggtagcgtctgccgctggtgtataacagtgtctccgcatcgggcgctgtttccggtttttcctcttcattattatcctcaaaaattccgctgataagatggtctatgacggccagaaacaatgcttctttcccgccaaaagaggtatacagagtggaacgtgacccgccggactgttcaattatcatatccagagtcgtgccttcgtaaccatgaaggataaaaacatccgcagcggcggtgagaatggcatgacggcggcgctgccctttcggggttaatggtgacggggtggatgacataacagatacaggctcctgtggcagtgatatgtcctgatttaaccacgccgcgcaggattgctcaatagcctgtttccctgccatactgcaattacggcatagtaagactatttattatcaaactattgatcaaacccagtgagttgttaatacaaagaattagaatagcgggaaagtcggaccatcaacggttaacggtaaaattatgggacaggggaaagagattacacaggatatgcagcgggcaatcacccgcctgtgtatcgagtgcgggctgctgctgttacagcacggtgcggaaagcatgctggtggaggagctggcgggacggacagggaaggctctgggagctgaccaggtggattgcgccatctcggcgaatgccattgtgctgaccacgatcattgacgggcattgcctgacatccacccgcaaggtggtcgatcgcggtattaatatgcatatcgtcacagaagtgcagcatgtggtgatcctcgcggagcacggtcatcttgactgcaaaggggtgcagaaaaaattcgctcatatgaaaccactgcgctatccgcgctgggtgatggtgctgatggtggcgctgtcctgtgcctgtttctgtaagctgaataacggcggctgggacggggcggtgattacctttgccgccagcggttgtgcgatgtatgtccgtcaggtgctgaccgcacggcatatgaacccgctgattaacttctgttttacggcgtttgttgccacgatggtggcaggaatgatgctgaaaatcccgctgttttcggcaacgtcaggtattgctatggcggcaagcgtgctgttgctggtgccgggttttccgctgatcaacgcggttgcggatatgttcaaagggcatgttaacaccggccttgcccgctgggcgatggcgagcctgcttaccctggcaacctgtatcggtatttttaccgcgatcacactcggcagcctgagggactggatatgatgacggtactctcttttctggctgcactggcgcaggatatgctgctggcggctattccggcggccgggtttgctatggtatttaacgtgccgaaacgggcactgaaatattgcgcacttttgggggcgataggtcacggcagccggtttatgctgattgccgccggttttgacatcgttgccgccacattctgggcatcggtgctggtggggatcatcggtattcagtggtcccgctggtggctggcacacccgaaagtctttaccgtagcggccataatcccgatgtttccgggtattaatgcctatatggcaatgctggcggtgatcaaactgtcacagtccggttttaccccggaactgctggagatgctggtgagcaatttcctgcgggcgggctttgtggtcggcgcgttgtctatcgggctgtctgttcccggtttgtggttgtaccgcaagcgtccgcgcgtttaactgatacgggtcagattcaggataatgtccataaccggtttatcggtcacactaatctgaatctgcacccggttgcggctttcctgcacacggacatcaacctcattatcatcgtaggcacaggcggtgccgactatttcttctatcatctcatcgaccagcggatgcatcgttattctccggaattcgtattgatggctgcgtagtataacgttttgaattaaaaccattctgtaaaaaaacaccctgaaattgtcttatccggcggattgacagattaataaaaaatctgtggcgataattcccgcacggcgtggcataattgccacccctggtattctgttggtttatgatttatatgcgtatttttcaatcatttcgtgtttcattattcttgttgtgtgttattacgtctgcggtatttgcagctgtgccggaacggtttgacgaggccaaaatagtggcccgtgaaaaaatttattacgaccagaaccgtaacccgcagggggaaggaacactgtattgcggctgtcagtgggagtggaccggaaaatccggcggccgggtggatctgaacagctgcggttaccgtgtacggtcacagctgacccgcgcagagcggattgagtgggagcatattgttcctgcctgggtgttcgggcatcagcgtcagtgctggcagaacggcgggcgcaaaaactgtgtcagtgaggacccggtcttccgtgcaatggaagcagatctccacaacctggcgccgtctgtcggcgaagtcaacggggatcgcagtaattttcgttacgggatcgcacgcggcgccggttcacagagctacgggcagtgcaccagccgggtggattttaagcagcgggttttcgagccgcgcgatgaagtcaaaggcgaggtggcgcgggtctggttctatatgcatgaccgctacgatctggcaatgtcagaacagcagcagaaattactgatggtgtgggacagcgaatttccgccgtctgccgccgagcgggaacgggatcgccgtatccgtgcggttaccgggcagtcaaacccgtttgtgaccggcgaacgccgctgggagccggggcatatcaacagtgctgacggtatttttacccgcctgccgtccgtgccggtgacaccggtaaacgtaccgccgcaggcagaaaaaaagtctgaaaatcagcgtatccgcggtaaccgtaacagtaagatttaccactttccggattgcccgggctataaccggatcagcagtaaaaatgttgaaatgttccctgatgccgcttctgcacaggccgcaggctatagtatggcgaagaactgcaaagcacgctgatgtgcggcggataacagaaatgtggcaaaaatgttaaatatccgccgattttaattgctgaaaagaaagtattgtcattatactgtcacaaagtcagtttagtgttcgctttagtttgtcatctgaggataacgaatgcgacatacagacgaacgacagtaccggccggtgataaataccctgaacaacagggcggatttatcaccggcttttttttatctgaatgttcactcatggcttgaagggagccgccggttgccaactcactgtttcagttattccgtcatcagaaatcaacaggattaagattatgggcagacaaaaagcggtagtcagagcacgcaaagaggcaaaacgaatgagccggaaagagtcgcgcagggcacgttttaatgatgataatgtggcggtttttatcccggcgggcggggtggaagctatcggcatggcgcgggaaaaacgcgacaacagtgctgttttaccgcgaaatgatgcacaggataaatacatcagagcgatagcgcataaacaactgattattgccaacggcgaggccggatgcggcaaaacctttatcagtaccgcactggcggcagatgcactgatcaataaggaaatcgagcggattattgtcacccgtccggtgttacaggcggaagaggatctgggctttctgcccggagatatcagtgaaaaattcgcgccgtatttccggccggtgtatgacgttctggtgaaacggatgggggcttcatttttacagtattgtctgcgtccggagataggtaaggtggaaattgcaccgtttgcctacatgcgcggacgaacctttgagaatgcggtggtgatcctcgatgaagcacagaacgtaactgtcacacaaatgaaaatgttcctgaccaggatgggggagaatgtgacagtgattgtcaacggtgatgtcagtcagtgtgatttaccgggcaatgtcccgtccgggctggccgatgtgctgcgccgtttccgggatgacgatatggtatcagtggtgtctttcacgcaggatgactgtgtacgttcgtcactctgtctgcgggcattgcaggcgtataactgatcacagcggctgcggcggcagacactgccgcagcctgtttattctcagtcgtcagcatccatcacatcatggcgcaggcggtgataaccttcttcgtcataaccgaaacgccagtacgggatcgcatacatctgactgtgttccccgttcagttcacggcgcacatagcggcgcagatccctgaccatcgcatcttctccggcaatccagaacgtacactctgtcacatcggcgaccggccagcttttaaacagtgcggtgacttcagcggttttctctgtgccgccggtcacccagtgcagggtgatacccgccggtttgttcagcacctgctggtcatccgcatgatcgatgcggatcaccacattgccctgagcctctgcaggcattttttccagcagcgcggcaacagcgggaagtgctgttaaatcagctgccatatagtagtgtttcgccaccggcagcagcggatccggtccgccgggattggtaataccgatataatcacccggtttggcatttctggcgaaatccaccgccggaccggcatcatcatgcatagcgaattcaatatcgatttctttcagttcagggcggatcgcacgcacggtataggtacgggcggtcggccgtggtttatcttccggccagaccggtcctttatcggacaataccggcagagcaggcggattcggcgcatctttggcaataaacagcttcaggtgaccaccttcgcaatctgccggataggtatccagtgactcagccgtaaaggtgatgcggcgcagattgggggtgacgtcggtaaaggatttcacctgaatcagacgcggcggtgcagggcggtagatatttttttcccggctcatgcgcaattctccgttctattgttattagtttcgttatatctatttcgcggagtgtatcaggaattcagaagaatggtaatcattatcaataaaattatttaaaaaagcacaccgtatgggggtacggtgtgccgggcaatgcagctgcttacacagtgcatgacgtactgatgaggtacttactgatgagacatgacgactatcttactttcattcccgccgccgtcattaataagcggaaaagcgatgagactgcaaacaatgccagaacactgcctgcccagatagcgaccatccaggcggcttttttccaccagggggccgctgcggcagactcagtggtagccctggtcatgggtgatttttcctctgaagacataataactccaccaggtatataccaggatcacaggtatgatgaataaagcgccaaccagcataaagctcagactttcgccgggggcggcggccatttcataatcgatcaccggcggaataatcatcggccagatactgataccgagtccggtgaaacccagaaaaaccaggccgagtgccgcaaaaaacggcgtatagtgcagatgacggctgacactgcggaacagcgcaacggcacagacaagcaccagcagcggtaccggcaggaagaacagaatattcgggaagctgaaccagcgcgccgcaatggtgtcatgcgccagcggtgtccacagactgatcacggccagtaccgccagcatcaccagggtcagaggtttcagcaccttatacatctgctgctgtaaatgaccttccgttttcatcaccagccagccgcagccgagcagggcatacgcgatcaccagaccgaaaccgcagaacagcgggaacggcgccagccagtcaaaggcaccgccggtaaaggcgcggtttgcaaccggaaaaccttcaatcacgctgccgacgactacaccctgcacaaaagtggcgataactgagctgatcagaaacgcgcgatcccagaaataacggtgatgttcatctgctttaaagcggaactcaaaagccacaccacggaagattaacgcgaccagcatcagtgtcagcggaatggcgagtgcatccagaatcacggcataggccagcgggaaagcaccgaacaacgcggccccgcccagcaccagccaggtttcgttaccgtcccagaccggggcgacactgttcatcatcaggtcgcggtcagcattgcttttcacaaagggatagaggatgccgataccgaggtcaaagccgtccattacgatatacatcagcgtactgaatataataatgacgaaccaaatcaggggtaaatcaatgcccatgagacacctccggcgcgatacctttgcggatcagtttcatcatatagatgtagccgataccaaacacagaaccataaacaataaagaagatcagcaggctgatgctcatatgcatctcaccgtgtgctgaaacggcatccgttgtgcgctgtaacccgtaaaccacccacggctgacggccgatttcagtcacaaaccagcccgcgagaatcgcgataagcccggacggtgccatccataacataaagcgctggaaaggccgggaatcatataaacgcccccggtaacgcagccacaggctcagggcggcagccagcagcatcagcatgccgaggccggccatcacgcggaatgaccagaacacggcgaacacattgtccggtctgtcttccggcgggaattcagtcagtgcgggcacctgcttatcaaggctgtgtgtcaggatcagactggccagtccgggaatttccacggcatagcgggttttttcctgagcattatccggaataccaaacaggatcagcggtgtggcctccccgggtttgttctcccagtgaccttccattgccgcaaccttaaccggctgatgtttcagggtgttcagcccgtgcgcatcaccaatcagtgcctggagcggtgcgagaaccacaatcagccacaatgacatggagaacatctttttcatggcaccggatttgttgccgcgcagcagatgccaggcggcagaagcagcgataaagaaggcggatgccagaaatgccgcagttgtcatgtgcagcaggcggtacgggaaggacggattgaaaatcaccgcgaaccagtccaccggcaccacaacaccgttgatcacctcatgcccctgcggggtctgcatccagctgttggaagccaggatccagaaagtggacatcagtgtgccgagcgcaaccatgcaggtggcgaaatagtgcagcttttcaccgacacggttccagccgaacagcatcacgccgaggaaaccggcttccaggaagaacgcagtcagtacttcataagtgagcagcggaccggtgattgatcccgcaaactcagaaaagaaactccagttggtaccgaactgataggccatcaccagaccggaaaccacccccatgccgaaattcacggcaaagatggctgaccagaaatgaaagagctttttgtaatcctcattgcgggttttcagccacatcccctcaagcaccgccaggaatgacgccaggccgatggtgattgcagggaaaatgatatgaaacgacacagtgaaggcgaactgaattcgcgcaagctcaagggcacttaacccaaacattgtgacctctcgttgttatagctatgtaaatgataattacgcagatgaaatgtgtggcacagtacaccatgagttgctaaagtataatagtgacaattagtcatgaaatgtccataacagttttacggagagcgctccatgacacgctacgaacagttagcagagcagataaaacagcagatcgaagatgatatctggcaggttggtgaccggctgccgtcattacgggaaagtgccagacagtcgggactgagcctgatgactgtcgtacagtcgtatcagttactggagagccagggatgggtggtggcccgtccgcagtccgggtattttgtcgccaaacgcgccccggcgtttgcccaggccaaaggtggtctgggtatgcacctgagtgaaaatgtggagatcaacgcctcgctgtttgatgtccttcaggcctgcaaagacccggccattattccgttcgggtcggcattccccgatccttcgctgctggtgcagccgaagctctccaaagcgctgggcgcagtggcccgccgcatcgcaccgcagagcgcggtggtcaatatgccgcccggtaatgaaaaactgcggcgtaatatttcccgccgctatgccgcacagggtatccatgtctcgccggatgatattgttatcaccgccggagcaatggaatcactgtcactgagcctgcaggcggtcacggaaccgggtgactgggtggtgattgaatccccggcattttacggcgcattacaggcgattgaacgtctgcgcctgaaagcagtggcgatcaaaaccgatcctcagaccgggattgaccttgatgcgctggaagaagtcgccgggcgctatgatatcaaagcctgctggctgatgacgcacttccagaacccgctcggtggtaccatgccgccggaaaacaagcggcggctggtggagatcctgacacggcatgaaatcgccctgattgaggatgatgtctacagtgaactctggtttggcagcgacgcgccgcaaccggcgaaaagcctggataaagacaacaatttcttccactgctcctcgttttccaaatgtctggcgccgggcttccgggtcggctgggtggcggccggtaaacatgcccgcaaagtccagcagttacagatgatgagtaccgtatccgccagtatgccgacacaacaggcgattgcggaatatctcggccagggcggttatgatgcacatctgaaaaaattgcgccagcaactggagcagcgccagcaccggatgctgtatgccatcagcgaatatttcccgtcagatgtgaaggtcaactgcccgcagggcggctatttcctctggctggaatttgaaccgccgtttgatgccgtcaaactgtaccgtatggcactcaatgagcagatcagtatcgcgcccggctcgatgttttccaccagtgaccagtttaatcacgccttccgcctgaactgctcatttgaatggaatgagcggctggataacgccatgaaagtgctggggcagctgtgtcatgtactgaagaaaacacaggggtaatacaaatttgtcatggcacagatataaaaaagggcacttttcagtgcccgttttgctgattacgctgactttccgcagattaactgaatgccaggctcattgcagcggtggccagtaatcccccggcaacgccttcaccgatacggcggcgtttgtcgttatattcccctttgctcatctggccgaaaatcagtgccacaccgctgtaaacaatggcacagctggcgatatacacaccggataacaacagggactgcatcgcaacactctcactgccggaaataaagttcggcaggatagcaaagtagaccagcaggcctttcgggttcaggaagctggtaaaaaagcctttggtgataaccgattttgctgccggctgcatcggcggcatttcgctcttgtgcatggcagacatcaccatacggaaagccagatacgcaatataggccacgccgaaccagcgcatgccgttaaacagaaccggggatgccaccacaacggctgccagcccgaatgccgccagaatggaatgcataccgtaacccagcagcacgcccatgttggctttcagtgccgcgcgggaaccgctggcgagaccttgtgatgaaacgaataaaatatcgggtccgggagcaaatacaatgggtaacacggttgcgccaaacaccatcaatgtatttatgaccatacgacaccccaagttcaaaaaatatatgaataattcacaatctgttgaatattaagaatttaattcaatattgtgacgtcatgatttgttatgcaaattatacggggctttgcgggaaattaggttgttaaattgacccgaaaaaactattcttagcaatattattgcgcggaaactatcaggtggtgatttaaatgtcaattgaactggataagatggatcggcggatcctggaccagctgcaacgtaacggcagaatgcagaatgtggagctggcacgcgaagtggggctctctccgtcaccctgtctgagacgggtacgtcgtctggaggaaaccggcgttatcaggcgctatgcggcgattctggacggcagcaagataggcgctgggctgatgctctatgcccgtatctggtttaaggggcaggacgcacagactatcaatgattttgtcgcggccattaatgaaatgccggagattgtggagtgtcatctgatggccggtgaatgcgatgcgatgatccgcattgtgaccaaagacctgacctcataccgccgctttcatgccgatcatctgacacaaatcccaagtattcaaagcgttaaaacggaagtgccgatggaaaccctgaaggtgacacacgcgttacccctgtaaactgtgaggattatcacgaaaagcaacagaattgtgcactcatgcaggttataagcaacaggattgcgcagtgattttgtgatgagggtcaaatcagaggcaaagaaaaaggcgcgttaaaaaacgcgcctctgcagataaaaccagaatattatacttcggacatcagttgccggtaacgctgatcatcatgatacaactgatggaatacgcggtatttggcatcataaaactgtttgatgctctctgtctgcggtgtcacggttttgctgatccggctcatggcctgcatcgcttccgggatagaggcataaaagcccgcagccacagagccgagcatggccgaacccagcagaaccgcttcactctcttccggcagcagcatggcgcatccggtggcattagcgtgttcctgaataaagatcgggttcttggtgccgccgccgcaacccatgatggtatcaatggcatatccggctttattcatctcttcaatgatatgacgggtgcccagcgcaatcgcctggatggtcgccagataaatcagcgcgagatcatcaagggtctgggtcatacgcagaccggtcaccacaccgcgcagattcgggtttgcacgcggcgagcggttgccgtggaaataaggcagcacatggatatgccgtgtcagcagggcaatatcctcttttgaacccgccagtgccagcaggcggtcgttgaggagctgatacaccgtctgctggttctgttcagccagttttttcgcgtcactgtactgcgggtgtgacgtgatcatatggtcgatcagcgcgccggttgcggattgtccgccttcattcagccagtaacccggaatcatagcactgtaataggcaccccagatcccgtcgataaagcgggcatttttggataccgccatatgacaggatgaagtaccgccgatcagcgccagccgggtgttgaaatccggttgtgcgccggtggcatctgcggcacccagcacgccgataccgccggcgtgtgcatcaataatcgaggtggcaaccggcgtgcccgggatcagccccaaatctgccgctgcgtttggtgtcaggccgttaccgaccggctcacccatcgggcggatttcgcggccgataatctgcgcatcgttttccagaagatcttccaggccaatctggcggaagaaatgggtatcccagcgatcttcatggccgaggtaggtccatttacacacggtggagcagagtgaccggctgttggtataggttgctttccaggtcagaaaatccggcagatcaaagaaatagcccgctttcgcccaggtggtcggcatgttctgcttcagccataacagtttcggtgtttccatctccggcgagatgcggttgccgacatacgccagcaccggatgtttggtgtcattgatccgctgcgcctgactgatagcccggtgatccatccacataataatgttctgctcgctgcggccggtcgggctgaccgtcagcggctgaccctgtttatccagcaccaccagggagcaggtggcatcaaaaccgaggcctttgacctgaatcgggtcgatacgtgcctgtgccaccgcatcttttaccgcgaggcacacactgcgccagatatcatcggaggattgttccacataatccgcctgtggtttgaactgacggatatcccgctttgcttcgccttttttgcgtccggcagcatcaaaaaccccggcccgggcgctgccgctcccgacatccacaccaataaaatagacactcataatccgctcccttatgaccgggctttctgcaatgcaataaataagataagaataccgccccacagtgccatgatgaggtaactgctgacacccagcaggttcaggccgctttccagcatctgtaagacaaacagggccagcacaatgccgataatgcgtccgaagccgccgtccgggttcacgccgccgagcacagaggcgagaatagcgatcagcaggtaagattccccgtatcccgctttggcagagttaaacttagccatcataataatcgcggccacccagcacagaacagatgaaatcacatacactgccataatggttttctgtgtgttcaggccggaaaagcgcgttgctttttcattagaacccatcagataaacggtacggccgagcggcgtatattccagcaatccccacagcaggaacgcaaacagcaggaacaggatcagcggcatcgggatcccgagcagggtaccgttaccgagccacagcagtgacggcgggaagccggaaattacggtaccgccggaaatcaggacattcaggccgttgattaaggtcatcatcccgagggtggcgaggatcggagacactccgacaaacgcaatcagaaaaccgttaatcagaccgataatcacggcggtgaccagcccggccagcagggcaggcagtaacatggcgccatcacccgggctcatcgccatcacactcgccatcaccagcccgcaggcattggtggtggcgataatggacaggttgatcccgccggtcagcatacagacagacattgccagcgccagcataccgagcagcggcatctgggacgtcattgactggaagttggaaacagagaaaaacgcacctgcattaaacatcccctgcaacagcaggattgcggccatgatcaccagcaggtaaataatgttgcggtcactccgcagattcagcattgacatcatgacagatgacctcccgcagcggcacggcgtttttcgttatacgcggtgaaactgatactgataacaatgataagcccggtcagtacggtgtgccagtaagacgggacaccggccagggtcaggccgtttttgacaattgccagcagggcaaccccgaggataaccccggtaagagagcctttgccgccggtcatactgacaccgcctaataccacagctgccagcactgtcagttcaaagcccatcagggcattcggtgcaacggactgagtaatttgtgtctgcaccacagaagcaatccccgccagcgcgcccatatagccgtaaacaaacagcatcacgccgagaatgctgataccgacacgcttcgcggcatccgcattaccgccgaccgcataaatctgacggccgatacgggttttgctcatcagaaaaccggtgaaaataatcacggcaatcagggtcaggatcggcagggacaggccgtagtcataaccgtcgctgccggtaaatgacatcacctcaaccccatccataaaccactccgggaaaccgtacagccattcgccgttggtgaaatagatcagcaggccgaaaaagatgttcagggtggaaatggtgataataatagacggtactttcaggcggtaaatcagcagggcattgatcagccccagcagtaaaccaacaatcgccgcgatagcaaaggcgataaagaaattgccgccctgtgacagcacataagtagccatcacatactgcgcggtggccgccgtggccgggaaggagatatcaatcccgccggagaccagcaccacaaacagaccacaggccataatcgccagaatggcggtgctggtggtcatatcaaacacattgcccaatgtcataaaatcttcattggtgatgctgagaaacacactgagcagcacaattaataccgccagccagaactcatgatgtgcaaacagatgacgacatgacttaagcattaaccgcctccgtgattgcctgctccgttgtggttaacggattgaactcatgggtaaaacgaccttctttcatcacaatgacccggtgactgttatagaatacttcaggaatttcatcactgatcattaaaatcgccatgccttcggcggccagcattctgatgatctgataaatactctctttattggcgacatccacgccgactgtcggggaatcgaggatcagaatatccggttttgccgcaatccacttggcgatcgcaatgcgctgggcattcccgccggacagactggtaaccggcagcgccgggtcggacacttttatctgcagtgcctcaatcagtccgctgaccagttcatgcgcccgggtgtgatcgagcagtccgcctttgcgggtcagacgcggcagcatcacggaggtggtgttgtcgtgaatggactgcgccatcaccagccccgtactcatgcggtcttccgacacatagccgataccgtggttaatcgcatcccggttggagtgcagcttaaccggtgaaccgttgatcagcagggtgccgctgtccggtttcgtcatgccgaacagtgacagacacaactctgtgcgtccggaaccgagcaacccggtaatgctgaccacttcgccggcatgcagcttcaggtcaatatcataaaattgatgttgctttgtcagtttctctgcgctgagacgtaagagtcccccggtgttgtacgcagaaagcggtgtgaactcgaaacgctgaccggtcataagatacgccagctcatcactgttcatcttatccgcatcatatgttccgatcagtttcccgtcacggatcacggagatccggtcggaaatttccatcacttcatccagcttatggctgacaaacaccacggtgacgccgttggctttcagatcagcgaccacgcggatcagctgattgacttcactgcgcgtcagtgaggctgtcggttcatccataatcaccagccgggcgtcatttgccatcgcgcggcagatagcaaccagctgacattcagcaatggaaagttgttcaacacgtttatgcaggggcagggacaagccaatgcggctgataatttcctgcgcctgtttcatctggcggcggcggttagccagccctttgtaccacttaacatgttcctgaatcacaatgttttcagcaacggtcaggttaggaaagagcgagagatcctggtaaatcacctggataccctgctcaatagattgctgcggggttaacctgttgtagctttgcccgttaataataatttctgcgcccttttccggcggatgaaccccggagatcaccttgaataaggtacttttgccgcagccattcttgccggcgagacaatgaacctcaccccggttaaacgtcagatttatattatcgagtgcaatgacggagccgaagtgtttggaaacctgttttaaggtaatcagtgcgtcttttgacatataccagcccatgacagggcagcatagatgctgccctttttaacaaaaaataaagaaggatcagaaaccgagcgaggtggcgttattgccgtcaacttccaggattttattgaattttatcacctgtttctgagtatcgatttcagctttacccagatctttgacttccacaccgtcagttacttttttgccgtccagcatatctttggagacagacaccagcgcgtaacccgcatcagccgggttccacaggaaacctttcttgatttcgccgcctttcagatacggtgcagcctgtgcaggcatcaggatacccgcggtgctgattttgtttttcgcacgttttttcttgatggcctcaccggcaccaatcaggcccagtgaaccgtaagaaacaatccctttcatttcaggatgggctttcatcaggtcattggttgccgcgaaagaggcatcaatgctttccgcaaccggcatgcggctggtcacttcaaacatttccggataggttttcttctgatactcaactgccaggtttgcccagttgttgtgcagaggaacggtcagggagccgacataaatcacatagccgcctttgccgtccatgtttttcgccagttcatccatggttgctttggcataagcatcgttatcgatagtttcgatatcccagtcggcgttatggccgtccggtgcttcatgggtcagcacaatgattccctgttcgcgggctttcttaaagaccggctcaagaacagtcacgtcattcggtaccacggtgatggcatcaactttcttggcaatcaggtcttcaatgatttttacctgctgagccggatccggcgtggaaggcccgacctggtaagcattgacgcccagatcttttgccgcctgctgaacccctttatccatctggttaaaccacggaatcccggagactttgacgacgttgacgatttcgtattcttttgccatgacgctggcggaaaagagtgcaacagataatgccgcaactttaaaaaatgatttcttcatcggtaataaccctttttatatggatacagagagtgttgcagggagaccaaatagaagcctgactataggagcagggatgataaaaaggggaggaagaactgaaaaatgtgatctgcgcccactattgatatgattgtgttatcaacttgatgccaaattgttttaattgacgttgcttgtaattaaattacatgaaaccatatcaatgaaacataaaattaacaaaataacccacaaataaaaacaattcatgcgttttattattgccatacggaaagtatttttattgacatttgtaaaaatacttatgacttacgataaaatcgcgctgaaccgattgtttataatgcaacaatagaatttgtttcattttaatgtgatttaaatcacaaaataaaatcagcgggtgatattaattctgaaataaaacaacacaagcaacagatatgatttacttattatttgattttactgtaatttttaccggcggttgttgaaacgtatcacagaataaaactgaactcctgtggtttcacaatcgtccggtaatcctctgcattcagcacaatggtttctgtcagcgtcccggcattgaaggcgatatcggtgtagcgttcaaacaaaaccgggtcaatcaccagctccagttccggattaaatgtaaagggtgccagtgccccgggaacacaatcagtcagtgttttcacctgttcagcggtggcaaaggaaatctttttcgcaccgaaaaaaccggccagtttttcgctgtcaattttttcatctccgggcaataccgccagcacatttttcttcacgccattgcctttcacttttaacaccacggctttggagcattgccccagctcaacaccgcgtacctgagcaacttcatcagaggtaaacccgagagcatcgtgactcattatttcatagcgggcgtggtgattatccagaagggtggtgattttgcggaggatcttatcagatgaagacatacggctttccctgtttcttattttgactaccgatcacggtaatcaaaacgacagggaaaaccaatgtgtttgcgtccggaatgtgatgtgaactacggccagttacgccagaaactgaccgataacagcaccagcagggtatatatctccaggcggcctaataacatagcaaaacagagcagatattttgccgccggagagatctccccgaacccgggtgctgttaacccgaaccccagccccatattattaatacaggcggcgacactggcaaatgaggtcattaaatcgtaccccatcagattaaggcaccagataaaaaagcaggtgcaaataacataaaggaagaaaaagctcaggacggaattaatcagccggtgctgcacaacggtatcaccgactttaatcagggtttgtgctttcgggtggatcagggaatagacttcccgccagctctgtttggagagaattaaaaaccggatcgcttttattccgccgcaggtggagccgacacaaccaccgaaaaaactggcaaataataagagaacaataatatgagacggccactgtgcataatcaccggtggcaagcccgttatctgtcagcatggagctggtgaggaaaaaagcatgcacaaaggattcttctgcggacgaatacatatttgcccgccacacttcaaaaaagaccagcccgataatcaatgccgccacggcaaaatagaaacgcaattccgtattactgaataagggcttcaggctgcgttttgccagcgccacaaaataaagggtaaagttgacggcggataataatgaaaaagcccctgccactaactcaatcgcggagctgttaaaatagccgatactttcactgtaagtggaaaacccgccgagagagacggtcgacagcccgtggcataaggcatcaaaccaggtcattccggccagtttaaaagcaaccgtgcagcaaaatcccagtaataaataggtgaaccacaaattgcgggcagaactggctaaacggggtgttaatttctcatctttaaacggacccggcatttcagactgatataaacgcattcccccgatacccagcagcggaaatatcgccaccgccaggacaataacccccagaccgccgataaaattaagctgggcgcggtaatataaaaccgagcggggcaaatcagtgacattgtgaaatactgaggcgccggtggtggtaataccggaaacaccttcaaataaggcatcctcaaaagccatattcagatggtcatccagccagaacggcatggcgctgataacagaaaataacagccagaataccgcaataaccaggaagccgtcccgcgtctgtaattgcagcccggtggttttactgcggtaccagcacactaacccggccggaaagaaaatcaggaaactgccggcaaacgcgaaaaaactctgctcctgcgcaataagcgcaaccagcatcggtaatagcagtgtcaggctgtaaatcactatcagaaaactgctcagatggataatgactcgggtacgggttgatatcacaggatgaccaccggattttctaaaataaacagcagataatacgaaatagctgatagtgaactgattgccgctgattgtaaattgttttcagctgaacagcgcagcaggatcaaaaaaggctgcaaccggcagcagccttctgtcagtataacggcacaaaaaagccatattacatcgtttcgtcagcccacacccgctgataatccgaaccgtccgtccgccagatttcacggatattttcaccggtatacttcagataatcattttcagcggaaaattgtgcagccagcgctgtttcacattccgtggtgatcctgcgcggcgcatcaataacggatgatgccacggaatcttcctgcaaacggattttcagtttttttaatccgtgctgcacatggaacagaaacagatagttatgaaacagaccgttatgcggcattctcagctccggattttttattggcaagccgggtataaataatgccgacggcgatggtcagtaccaggccaataataacaaccagtttaccgttttcagtcacaccggcagggcttgaggcataggaaaaattatgcgcaaaagccgcgccggtcagcatccccagcacactgacagccgcatcggtattaccctgtccggcattggctaattgccgcagcgggcagccggtaataaagacaccacataatccgaccagtgacatggagaggaaattccacagcccgtcattatgggcaatcggctgattatcaaacccgatattgatttttccggtgagcatattaccggcaataacaaccagcagcagggcgagaacgccgattgccatcgtgtaattgcgggacagaaagatatttttagccataccgataaaacagaaacgggtacgctgaataatcaccccgataataagcccggcggttattgccatccagaccggagcatgagcggctcccggccctttgacactggatttgaaaatggaactgtcgataataaacagcacaaataagaccaggcacaccgccggtaatattaagccttcagcggcagactgctgataattacgcggtaatgaaaatcctttcttaataaacagactgccgataccaataccggcgaccaggcctaataacccgacaaccgcatttaaatcaccggcaccaatccgcaggatcatccgcagcggacatcctaaaaaaaccagacaaccggccatcatcagaaaaccgagtgtaaagcggatcaccggtgcagaaccggctttggactgaaattctttaaaaataaccgcagccccgaatgagccgagaataaaaccaaaaatttcaggacgaagatactggacggtttcggtattatgcaatcccatactgcctgcactatcccggataaaacaagcgacacaaacacccatatttggcgggtttccgtatataccaaggactacagcactgatccctataataataccggaaatgatgataattatttttgttgcggacattatatgactccgttatggagatgttatctcctgactaatagaacctattaagcacagggtcaatgtaccgcagtgacaaataatatcttttacccgggtcaaagattttgaaagcagtaactaatctccgtaaattcacggaacaatgatgcagatagtaaaatcatcctgatgaaggttatcgctgataaaaaattgagatataaaaggtaacaacactattgtttacagccataatttttattaaaatttattctcaatttaactagcggatgataaataaaatgccaatttcatttgagacatcaatatcttatgtatcatcaatctttaacaaagaaatggtttttattttatgtttatcaataacaattggcttgttttattatataaggaagaaatcaaaatcaggattttctgttgtcagaaggatatggagggtttgtattgggtttaattataaggataaaaatgattttattaatgatatattagaaattgaagaatttaattattattataacacgagtgcagtatcgaagcggcaaaaaaagaaatttcaacattgggtcagaaagttcgaattggattttaaattaatatctaagcttaaaagcaacctctgcattgagagattaaaaattaaaaaaatcaataagatattatttttctcccttccggtagagattgcatttttgcttacgctggtttttattccggttttaaatatagccgtcaaacctgccggattggtcagtatcaataattcagagtggtttttgattaataaagatggtgcccgtgaatatcagtattttggcgggaatacgccagcgtggatagtaaataaagataactgtttatctccggaagaaataaaatcaaccttagataaggatacggtcactatgatttgtaacacctttgataataaatcagaccaggattatcttgtgaaattaataaaggaacaacgattggtatatggttttttagctatagtgatattactcgtatcagtattccgatttaagtatatgctgtttttatcatacactctggatgcaagaaagatgctgtttaataaaataaaattatataagaaacggaaataaatatatatcaggtaaggcatcctcccggatgccttattaatatagattacacattaaacaggaaattcagtacgtcgccgtctttcacaatgtaatctttaccttctgcgcgcattttaccggcttcttttgcaccttgttcgcctttgtactggatgaaatcctcaaatgcgatggtctgggcgcggataaagcctttttcaaagtcggtgtggattttaccggctgcctgcggggcggttgcgccgacagggatagtccatgcacggacttctttcacaccggcggtgaaataggtctgcaggttaagcagggcgtaaccggcgcggatcacgcggttcaggcccggttcttcgataccgaggtcagccataaactcttcgcggtcaccatcctccagctcagcgatatcggattcgattgccgcgcataccggcaccacaactgaaccttctttctctgcgatttcacgcacctgatccagatacgggttgttttcaaagccatcttcattgacgttggcaatgtacatggttggtttcagggtcaggaagctcaggtagcggatcgcccccatttcttctttattcaggttcagtgtgcgcagcatctgtgcgttttccagcagcggcaggcatttttccagtacttccagctccagtttcgcgtctttgtcgccgcctttggcgcgtttctgcacacggtggatagcacgttcacaggtgtcgaggtcagccagcgccagttcggtattgatggtatcaatatcttctgccgggttaacacggccggaaacgtgaacaatgttatcatcgtcaaagcagcggacaacgtggccgatagcttctgtttcacggatgttggtcaggaactggttacccagaccttcacctttggaggcgcctttcaccagaccggcgatatcgacgaattccatggtggtcggcagaatacgctgtggttttacgatttccgccagtgcatccagacgggcatccggcatcggcaccacgccggtgttcggctcaattgtacagaacggaaagttcgccgcttcaatacctgctttggtcagcgcgttaaacagcgttgatttcccgacgttcggcagaccgacgataccacatttgaaacccataaattcttcaccttaaaaatgacagcagaccaaaacggcctgcaagcacgttaaataattgccgccgattatacacggttacggataaacagacgatacctgcggctcactgaccggctttaaatgtatgcagacgtgaaatggcttttgccatgccgtctttcatcagcacatcggtgcagcgcacagcttcatcgatggtctcatcaatcagttgttgttcggaggcggggggcttgcccagtacaaaaccgacaactttgcttttatcacccggatggccgatgccgatacgcagacgatgaaagttcgggttgttacccaatttgctctggatatctttcagaccgttatgaccgccgttgccgccgccgagcttcatttttgccacgccgggcgggagatccagctcgtcatgtgccaccagaatttcatccggggcaatctggtaaaaaccggcgagggcaccgactgctttgccgctcaggttcataaaggtggtcggtaccagcaggcggacatcattcccctgaatattcagacgcgcggtataaccgtaaaacttactttctgattttaatgactgattataacggcgggccagttcatccacataccaggcaccggcattgtggcgggtttgggcgtattccgcaccggggttggccagccccacaattaattttatctgactcacacttgtatcacttgttgttcaggcaggttttgactgcaaagagggctattctacccgtcacccgcgcggagtacaaaagaaacgtccttcccggacggatgtgactatttgtgcaataatttagcgatgaattattaagtttcgctttttggcacaataagccaaataaaaagttttatttttggtctatgtgatctcatacgcaacatatacgtatcaattcgggctataatctatgtcaagaaggaattcctactttcgtactttgagttgttagcagacaaaagagtgacggaggtccctatgaaacgtaaattatccttattgctcggtaacctgctgatggttgtcggtatgctgttgatggtcggcagtatggcctttactgtcggagtccttatttttgcacttcctttaccggatatctattctgaagcctccctgatggggatctttatcggtgccctggtgtggctgggcggagccggtctgagcgggcgccgtgaatccattgcggataaatattactggctgcgtcatttccacagccgctaccgccgtcggatgccgtaaacgaaatattatcgctaacggttaaaatgcctgccaacaaaaaacccgttgtcttcacaacgggtttaagcacgcaatgtgtatactgattatgaaatcagtgttcgaacatcgcggagatagactcttcattactgatacggcggatggcttctgccagcattccggataaagtcagagaacggactttattcagtgctttgatttcagctgataacggaatggtgtcacagacaatcacttcatcaatcacagaatcacggatattgttgaccgcgttgccggagaagatagggtgagttgcgtatgcaaacacacgtttcgcaccacgttctttcagtgcttccgcagctttgcacagcgtgcccccggtatcgatcatatcgtcaaccagtacacagtcacgaccggcaacatcaccgatgatatgcatcacctgagaaacgttcgcacgcgggcggcgtttgtcgatgatagccatatcagtgtcgttcagcagtttggcgatcgcacgggcgcggaccacaccaccgatatccggagaaaccacaatcgggttgtccagatctttctgcagcatatcttccagcaggattgggctgccgaagacgttatcaaccggaacatcgaagaagccctgaatctgctcagcgtgaagatccactgtcagcacacggtcaacacccacacttgagaggaagtcagcgaccactttcgcggtgattggcacacgcgttgagcggacgcggcgatcctgacgggcatagccgaaatacgggataacagcagtgatacgacccgcagaagcacggcgcagtgcatcaaccatgacaaccagttccatcaggttatcgttggtcggcgcacaggtggactggatgatgaaaacatcaccaccacgcacgttttcattgatttgaacactgacttcaccgtcgctgaaacgaccgatcgcagcgtctccgaggttagtgtacaggcggttggcaacacgttgtgctagttccgggatggcgttaccagcaaaaagcttcatatcaggcacgagaaaaacctcaggcatgcgtccagagagattgaattgtgaacctgaaagcgtccggagacggaatcaggggcaattacagtagaccagcgcggaactgatgaagcggcgaaatgttgacaccacgtgccacaaagcccttcacccacgccggcgcgttaattaacacctgtcgggcggctgcctggttttcgaactctccgaacacacatgcacccgtaccggtcaggcgtgacggagtatattgtagcagccaggaaagaaggcaatcaacctcacgaaaacgttttcttgcaatcggttcacagtcatttgcgtacggagcctgtaataatgcggccagagagcggatcggcgtgtcgcgaattaattgcggatctgtgaagataagcggtgtcggaaccgaaattccggggtgtgcaaccagataccagcgttccggcggagacgcagggtgcagaatttcgcctattccttcagcaattgccgcgtggccccggacaaataccgggacatccgcaccgagcatcacacccagctctgcaagcgtttcgtcgggtaactgtaacttccagtgatagttgagagcgataagcactgtggcagcattggaggaaccgccaccgataccaccgcccatcggcagaatttttttaacggcaatatccgcaccgggtaaatccgctgtcaggtgatgctcccgtgcataaatctgtaacagacgggcggcgcggatcaccaggttttgctcatccggtacgccggcaagcggggtcagcagacgaatttcaccgtcagtacgtggtgtaattgtgacgctgtcaccataatccagaaactgaaacagggtttgcagcgtatgatagccgtccgcgcggcggcctgtgatatataaaaacaggttcagcttggcgggggacggccaggtcagtgatgtcagttgagtgtccatgaatccattttcagcttgatgcggttatcaccctgttcgatatccaggcggttcggcagttgcggggagactttttcatcataggactgataagtgactttccacttttccatgccctgagcccagctcagcgctttcaggtgatactgattgctgatggcataggactgcgcgtcacccggcaggccgacaatccactgacgcagattttccatcgggatagtcataccggtcagctggtaaatcatgctgtccggatcatcactgtaatatttctgacctttgttatcggtcagctgggtctggccgtctttgacaatcagttccagctcggtgctgccgaccgggttggtgagcagcagtttgtagttgtccggggaatactgctgccagaagaaacgggcataggttttctgggtggtaccgatgtaggcaaacgagccgcgcgtctgataacgctgtaactgatttatttgttctgtctgtgctttccagccggcagaggtggcggaaacatcgcctttctctgtattgtcgggcagggtacaggcggcaagtatcaggctgcacaggggcagaagccggataaagcgcggtaattgaatagaggccacgttgtaatttcctttaacaacttataaaagcaataacagtattgtgcctgtttcagtggctgtttcctacctctcttacgctgatttacgcaattatccgcccggctgacacggcctgttgcgcaccgcattacgtgcttattatcactgtttcccgtttaacgctttaattgcgcgggatcggctgctaaaatgcatgcagttatccttagtaagggtgttgatttccggtatacttaaccggtattttacacacttaccccggtctgtattgcaggatatgactctattagctctcggcattaaccataaaaccgcacctgttgccttacgtgagaaagtgactttctcaccggacagcatggaagcggcattaaccaatctgctcgaacaaccgtccgtgagcggcggcgttgtgctgtctacctgcaaccggacagaaatctatctcagtgtggatgaacagaataatcagcgcgatcaactgattgactggctgtgccgctatcacaacatcaacccgcaggaactgatgtccagcctttactggcatcaggataatgaagctgtcagtcatctgatgcgggtggccagcgggctggattccctggtactcggcgagccgcagatcctggggcaggtcaaaaaagcctttgctcagtcacagacataccgttcactttctcgtgaactggaacgcctgttccagaaatctttctctgtcgccaaacgggtgcgtactgaaaccgatatcggtgccaatgcggtatcggtggcgtttgccgcctgtaccctggcgcgtcagattttcgaatccttatccagactgaatatcctgctggtcggggcgggggaaaccatcgagctggtggcccgtcacctgaacgagcacggcgtaaaacacatgatgatcgccaaccgtacccgcgagcgggcccgcgtgctggcgcaggaagtcaatgcagaggtgatcacactgccggaaatcgacagccggctggcggaagcggatattgttatcagctccacggccagcccgttgccgattatcggtaaaggtatggtggaacgcgccctgaaagcgcgccgtaaccgcccgatgctgctggtggatattgcggttccccgtgatatcgaagccgatgtggaaaaactcagtaacgtttatctctacactgtggatgatcttgaggcgattattgagcacaatctggcgcagcgccaggtggcggcacaaaaggcggaatccattgtggtgcaggaaagcgggcactttatggaatggctgcgcgcccagagcgcggtcaatacgatccgcgaataccgcgaacaggctgaagagatccgcgccgccatggccgcaaaagccgtggcactgattcagcaggggcatgacccggaagaggttatcaaccagatgtcacagcagctgaccaaccgcctgatccactcaccaaccaaatcacttcagcaggccgccggtgacggtgataccggtcgtctgactctgttacgcgacagcctcgggctggagcatcattaacttcctctatatattttttaaggtagcagactacgaatgaagccttctattgtcgcaaaactggaagcattgaaagaacgttatgaagaaattcaggcgcacctagcggacgccgatgttatcgctgatcagaataaattccgtgccttgtcgaaagaatatgcgcagctgactgacgttgcgaaatgttttgaagcctggcagaccattcaggatgatatcgacaccgcccaaatgcttcttgatgatcctgaaatgaaggaaatggcacaggaagagctgaaagacgcaaaactgcggaatgaaaccttagaacaggaattacaggtcttattactgccgaaagatccggatgatgaacgcaactgcttcctggaagtccgtgcgggcaccggcggcgatgaagcggcgctgtttgccggtgatctgttccgtatgtacagccgttatgcggaatcacgccgctggcggattgagatcatgaacagtaacgacggcgagcacggcggatataaagagattattttcagagtcactggtgaaaatgcctacggtaacctgaaatttgaatccggcggccaccgcgtgcagcgtgtgccggaaaccgaatcccagggccgtattcacacttcagcctgtactgtcgcggtgctggcggaagtcccggaagcggaactgccggatatcaacccggcggatctgcgcattgataccttccgttcatccggggccggtggtcagcacgttaacaccacggattccgctatccgtatcactcatattccgaccgggattgtggtggagtgccaggacgagcgttcgcagcacaaaaacaaagccaaagcactctcggtgctggccgcacgaatcaaagcggcggaagagtcccgccgtcatgaggcggaagcctctgagcgccgcaacctgctgggttccggtgaccgttcggatcggatccgcacctataacttcccgcagggacgggtgacggatcaccgtatcaacctgactctgtaccgtctggatgaggtcatggaaggtaagctggatgcactgatccagccgctggtgaacgaatatcaggcagatcagctcgccgcgctgtctgagcaggactgatgacgttccggacctggctggcagaggctgtcagccgtttaagtcacagcgacagcccgaaacgggatgcggaaatcctgctgacgtttgtcaccggccgaacccgcagctacattattgcttttgatgaaaccccgctcagcggggatgaacagcagcgtcttgaggcgctgcttgtccgccgggagcagggcgagccggtggcgtatatcaccggtgtgcgcgagttttggtcactgccgctggaagtgtctcccgccacacttattccgcgtcctgataccgaatgtctggtggaggcagcgctggaattgttaccggcagcatcctgcgatattctggatctcggtaccggcaccggcgcgattgcgctggcactggcctctgaacggccggattgccatgtgaccggggcggatatccagccggatgcggtggcgctggcacagcgcaatgccgcccgtctggggctgacgaatacaacctttaaagaaagtcgctggtttgcttcactgccgattcatcaatttgctatgatagtgagtaacccgccatatattgatgagaatgatgagcatctggtgcagggggatgtccgtttcgagccgcgcagtgcgctggtcgccccgcagaacggcctggccgatctggcggaaatcgctgcgcagtccgctcattatctgacaccgggcgggtggctgattgtggaacatggctggcggcagggagacgctgtccgcgaactgttccgggaaaacggattttaccgggtggaaacccgccgcgattatggcggaaatgatcgggttactttaggtcaacgggaagagaaatgaaaagcattgccgattttgaattcaatggtgcgccgttactgagcggcattatgttagtgttaaaaactgtccgtccggattttgaccgggaaaaggcagaagcacacatcaatgaacttatccgtcagacccgtaaacgcctcccgccgtattccgacgaacatacctgtttacagaccctgatcacactcttttaccacaaatggcagttcagcggcgccagcggcgtttattcgctgtctgacacgctgtggctggataatgtgctgcgtactcagcgcggctcgccggtatcactcggcatcctgtttctgcatattgcacaggccatcggtttgccggttgtgccggtggttttcccgacccagctgattctgcgggcggatcttgatgacgaaaccctgtttattaacccgattaacggcgatctgctggatcagcacacgctggatgtctggattaaaggcacagtcagcccggcgcatcacctgaccggggatgatctcgaagaagccgaaaacagccatgtggtgcgcaaatacctcgacagtattaaagtcgcgctgatggaagagaaaaaaatggagcaggcactgaaagtcagcgaaaccattttattatttgatccggatgacccgtatgaaatccgtgatcgcgggctgatttatgcccagctggactgcagccatattgcagtttccgatctgaattattttattgagcaatgtccgcaggatccggtatctgaaatgataaaaatgcagatccacacttacgaacagcagcatatcgttctgcactgataaacggatatcgttttacatattttcataaacgcaatttaattgcctctgccaaaaggttataccatgcaacagaaagtcgtatctatcggggatattcgtgtcggcaacgcgctgccgtttgttctgttcggcggcatgaacgtccttgaatcccgcgatctggcgatgaaaatctgcgaacattacgtgactgtcacgcagaagctgaatattccgtacgtcttcaaagcctcttttgacaaggcaaaccgctcttccatcaattcttaccgtggtccgggccttgaggaagggatgaagatttttgaagagctgaaaaaaaccttcggtgtgaaaattattaccgacgttcacgaatcctggcaggcacagccggtggcggacgtggtggacgtgatccagttaccggccttcctggcgcgtcagactgacctggtggaagccatggcgaaaaccggcgcggtcattaacatcaaaaaaccgcagtttatcagcccggggcaggttggtaatatcgcggaaaaattccgtgaaggcggcaatgaccagatcattttatgtgatcgcggtgcaaacttcggttatgacaacctggttgtggatatgctgggctttaaagtgatggaaaaagcctccggcggttgcccggtgattttcgatgtcacacactccctgcaatgccgcgacccgtttggtgccgcatccggcggtcgccgtggtcaggtggctgaactggcccgcgccgggatggcagtcggcctggccggtctgttcctggaagcacatccggacccggataatgcccgttgtgatggtccttccgcgctgccgctggcaaaactggagccgttcctgcagcaggttaaagctatcgacgatctggtgaaaagcttccctgagctggataccgaataatttccgatgcagcttcacacagtcgttaacatgttcggcgctgatcttcagcgccgttatggcgaaaaaatccataaaatcaccctccacggcggcttcagctgccctaaccgtgacggcaccctcgggcgcggcggttgtaccttctgtaatgtggcttcttttgcggatgaaaatgcacagtatgattccattgaggagcaactgagccagcagtccggcaaaatcacccgtgccaaacgttatcttgcctatttccaggcctataccagcacctacgcggaagttgaactgctgcgtgagatgtatgaatccgcactgactcaggccgatgtggtgggattgtgtgtcggtacgcggccggactgtgtgccggaggcggtgctggagctgctgcaaagctatcagcagcagggctatgaggtatggctggaactgggattacagaccgcccatgataaaaccctgaaacgtatcaaccgcggtcatgattttgcctgttatcaggccaccacccgggccgcccgtgaacgcgggctgaaagtgtgttgtcatctgatcaccggtctgccgggagaaaccgcagccgataatctcatcacacttgagcgtgtgctggagaccggcgttgaaggtatcaaactgcatccgctgcatattgtggaaggcagcaccatggcaaaagcctggcgggcggggcgcttacccaccatttccctcgaagagtatgtcgccaccgccggggagatgatccgccacacaccgccggacgttatttatcaccgcatctgcgccagcgcgcggcgtccgactttactggctccggactggtgcagcaaccgctggctcggcatgaacggcctgtggcagtatctgctggcaaacggcggccagggcagcgcaatctgagcgtgaattacagccagcgccgtgtctgctggcaataggccgcccagtcctgtttaaattttccggcaaggaatttttcttcctgcgggatgctgaacagatcggtgatcagccagaaaataaggccgccgatgagaaaatagtaagagtgggtcagcagagcaaagccgatacaggcagtggtcagcgcgaggtagaccggattgcgtgacagacggaacggtccgccggtgatgagatgggtcgcttcgccgagcgggttcggcgtggtgttatggcggcggaaatacaccagtgatgcaccaatccagccgagactttccagcccgatcaatatggctaaaatgccgctccagccgctgaactgaatcaccagtgcatctttggcatacagccagatggctgcaacggcgttgataatcagccagttaagaaagggaagacggaatacggccatgatttttctccggtaacagataaagaaacggcggacattacgcccgccgctctgttcattatagcctgattacagaggttatcatgcctctgatgtcacaccatccatcagccccagttcaatcagtgccttactgaccgacgggtaaaagctgattttattctcaaccgggacaatccgtgcccgcgccagggttttcagcggctggaacggaatatcggtgaccacgatgtgtgtatccacaccagcttcgtcaataaaacggcggaaggcttttaatccacccgcatcaagtaccggcaccgcatcccactgcattacaatggtgtgatatcccgaacttttgactttcagatcatcaaaaatccgctcggcagcggcaaagaacagcgggccgttaacccggacaaccagaagccctttgtcgtgatcggtataggaagactcactcaggcgcgtcatattggcgatacggcgcataaacagcagtgaggccagcacaatcccgacactgatagcaatgaccatatcaaacagcacagtgaggctcaggcacagcagcagcacgataatatcgtctttcggcgcgcggcggataagttcaatgactttagccgcttcactcatattccatgccaccatcagcagcagagcggacatcgcggccagcggcagataagaaagcagcggcgccaggatcagcagagtcagcagcaccagcagagagtgaataatagcagagaccggcgatgtggcaccggcacgcacgttagccgccgaacgggcgatagcagcagtggcggtaatgccgccgaagaacggtgcggtgatattacccagtccctgacccagtaattcgccgttggagttatgttttttgccggtcataccgtcaagcaccaccgcacagagcagcgattcaatcgcgcccagcattgccatcgaaaacgctgccggcatcagggcggtaatggtggcccagctgaacacaaattctttgccgtccggggtcggtaaattccacggcaggataaactgcggcagaatcggcgggatccccgcaccctgtgtaccgtccgccagggtataactgaaacgggagccgatggtggccgcttccatgccgaacagggacagcaccagcatcaccagcatcccggcaattacagcgggaaggtgtcccggcagacgaagtttcagtttcggccagtagatcagcaccagcagtgtggttacgccaatcagggtatccgacagattgatggtcggcatggctctgacaagggcaataaccttatcaacatagttttccggtacatgcgccatggtcagaccgaaaaagtctttcacctgcatggtggcgatggtgatcgcaatccctgaggtgaagccgagcaccacggaaatcggaatatattcaatgagtttaccgaaacgcgccagacccattgccagcaggataatcccggacatcagagtggctatcagtagcccgcctaacccgaactgctgggatacggggtagaggatcaccacaaacgcggcggtcggcccggagacactgaaacgggagccgccggtcaccgcaatcacaataccggcgatagcggccgtatacaggccatattgcggtgccacaccactgccgatagccaatgccatggccagtgggatagcaataatcccgacggtgatacctgcaatggtatcttttatcagacgggaaacggagtaaggctgtttccagcacgagtcaattaatgcagtaaaaagagataatcctttaaatgttgaaattttcatttccggacaactgtcacctctgagtcatatgaaaaaaatagggagacgccaacgcgcattagtctacgcaaaacagggagagatttagctgagatacatcaaatgacgctgtatacaatagcggatattaaaataaaatcaaaaatatgaagaagttaaggtgtaataaaacaggatattctgccgccggaccggatagcagcataaaaaagaaaaagcagaaacgaaaaaagcctgctgattgctcagcaggctcttctcttaagatggcggtgagagagggattcgaaccctcgatgcactttcgcgcatacacactttccaggcgtgctccttcagccactcggacatctcaccggggtactgttcgttgcgttgatatctcgctgcaacggggcgctactataggggaagcgacgtaacccgtcaatacacgccatgaaaaaaaatgtgttttttcgtttgtttaaccaaaaaaacagcatattggtgattaacatagcaaatccgctgaaaacagcgtaccggctgcctgaaaaataaccgctgatttttttccggcggaaaatcatctgccggaaaaatatgcaggtcagttaacaataacaacattttaacgatacgaaaatctgtccggggcttgaattctttgcgtaatcctatcaggctggtaaaaaaacagaggagcgccgcatgaatattattttctaccatcctttttttgattctgagctgtggatcaacggcatgaaaaaacacctgccgcaggcggatatccgcaaatgggttccgggtgataaccagccggcggattatgccctggtgtggttaccgccgcgtgagtgtctggccgggcgcaccaccatgaaaggggtctttgcgctgggtgccggggtggatgccattctgaaacaggaacaggcaaacccgggcacactgcctgccggggtgccggtgatccgccttgaagataccgggatgggggcgcagatgcaggagtacgcggttgccaaggcgctgtggtacttccgcaagatggacatttataaacgccagcaggagcagcgtatctggaaagcacagcctgctttcacatttgatgaattcgaaatcggcgtgctgggaaccggtgttctcggccgttctgtggcggaaaagctggcagagttcggatttaaagtccatggctggagccggacaccaaaacagatccccggcgtgaccagtttccacggcaacgatcagctggatgaattcttaagccacagccgcctgctgatcaacctgctgcctgacacaccgcagaccagagggatcctcaaccagtcactgttcagtaagctgccgcagagttcttacctgattaacctggcgcgcggttcgcatctggtggataacgatttactggaagccattgatgacggacagattgccggtgccagcctggatgtgttcgccaccgaaccgctgccggaaatgcacccgttctggacccacccgcgggtggatgtcacgccgcacattgctgcatttaccattccgtcagaggcaatgaaagcgattgtcgccaatattgatcggattgagcggggcgaagcaccgcagggtgtggtgaatatggaactggggtattaattctttacagcgataaggacaatccggacaatagcggcaactcagttaataaggatttgaagtatgaatgaattttcactggtctgccgcctgctcggaacgctgtttaaccgcgctccggctgatcctgtgctggcaccggttctgacgatgattaagcaggggcaactgaaagcccactggccgctggagcaggatgcactgctgacacggctggctgagcattgtgacagtgcggaactggcagcggattatcagcagctgtttactgacggggcggtggctcagcaccggtcggactataccggtgaaccggaaagtgaagtccgtcagtttctcagtgagcgcggtatgccgctgactgatgcggtaacagacagtttcgggtctctgctgctggcggcatcctggctggaagatcaggcacaggaagatgaagtcagtgcgcagacggcgctgtttgcggactatctgctgccgtggagtgatgcatttctcgggaaagttgagtcacatgcacagcacggcttttaccgcaccctggctattctgacccgtgaagcactgtccgcgctgtatgaagagctgacagaagatgcagaagaagacgaaaatgatgattaatgtgtgacgttgtcacacattatttttcaggcccggtcagatgaccgggctttttgtatccggctcagaacagcccgaggaaccagcctgctgccagggtgataaagctgaacagccagatccagaagaaggagtagcgcagatgccgtcccatatccaccccggcaatccctacagccagccacacagccggtgagaacgggctgacaaaggttccggcgttattaccgatagccatggcatacaccacatccgcagtgggaataccggcggacgccaccacatcacggacaatcggcagcagggcaaagtaataggcatcggtactggtaaagatatccagcggtacaccaataaagccgataatgatgtggaactgttccgccatgtgtcccggaataatcagcagcagatccttagccacggactccagcatcccgcctttatccataatccccaggaataccccggcggaaaggataattgctgccatggataacgcctgcggggcatgatggttaattactgccacctgatctttcggtttcgggtaattgacaatgagagcggcggagagcgccagcataaagatatacggtgccgcgagccaccccagagccaggctgaggatcgccagcaggatcagcgagatattaatcagaaagcgctgtggtttttccgtaccgtgttcgttatccgcctcatcatacaattcaagaagcgaatcctgctcatacggtgtggtgccgtattgtgccgcccgggcgatacggcgtttttcccgcagaccaaacagtgcggcaaccagcacggatgcggtaataccgataatttgcaccgggatcagcggctgccacaacactgaggcggaaataccggtcacagcagatgcgcggccgagcggcccgccccacggcaccatattcatcacccccatactcatacacatcagcagcagcatcagatacgggctcatacccagccgccggtagataggcagaaatgccgggataataatcagaaaggttgccgcaccggaaccgtcgagatgcacaacggctgccaccaacgcagtgaccatcgccacaattaccacatttccccgggtcagcccgagcatcagccggataaacggattgaagatatgcaggtctttcataatgctgaaaaacagaatggcaaacaggaacattaccgcgacactggcaactttcttgatgccgtaatcaaaaaattcagtgatttcaggcagagagtagccggccagcagggcgccgagcaggggaataacagacatggcaattacagggctggtttttcctgtcatcagcagaacgacaatagaaatgatgatcagcagcccaatcagtgtcagcatcagatgatccttatccggaatagttattttctgatgttactgaaagagattaggtgagtgttaaaaatgtttatgaattgtgaaatatatcatcaaaaaagaatcctgcagattcagaaaaaagcgctcaatcacaaattaattttatctgtaacagcagaaaaatcagtgtttcgctctgttttacaggaagcgtactgcagatgcgtcagaatgggataacctggtatcttttcgtatgcattgaattttcgtcatattcttcggcaaaacaggaaggtgataccgttcccggcgggatagttaaggaacggtatcataatttagtgaattaataatttactatcacaattaaaatttttaatcgaaattattcggttaacgggataacgatccggcccggccggatttcaatgcccttggcaaacttcttcgcagccgcttcggctgtattatcgccattcagaacatacaccggggtgatattgaaaaaggtgctcagtgtatgattgagataagggatcagcgcggaaatcagagtatcccatttgtccggatccagcgtgtaattggtaatttcaatatcccgcatatagattgacccgcttgcagcatcaaaatacggtgcggcgctgagagacatcgaaatggtgaaatcccgcgaaccaaacagcgaaaccagcttcagcgagccgattgccgtcagttttactttgcccggctcttcacggccaatctcggtgagcagtttttccagggtaaaatccgcatctgccacaccatccataccaatctgtttattcagacggatattctctgccaccgcactgttaatggtctcttcactgacactgatttcggttaatttatcgcagccggttaaaactgttgctgcgaccagtgccgcggtaaaaaggaataatctcatcggtatctcctgttgtataccacccgatactaacctgtgctgcggcaaatcccaaatatccggatcaatttaatacggcagggcttatcttcttcgggttaaactggcggtaaagtgctatcagtgtaatcagtccgattgtaccgagtaaaaaccagggaagttcaggtaattgcatttctttacccagatcatacagccagccgccgccggtataaccgatggcaccgccgaatgccagccccaggcggctgaagcccatgtaactgccgcgtgcgcgcggatccgccagtgacgcgctgagggtttcccgtgccggctcggcaatcactgatcctaaatagaacaaacagataatcgcgaataatacatgcagtgaatgagtcagtgcgaccgggaacatactcaggctcatcaggaataaaccggccatcagacgggtttccagccggaagtgtttttcactccagcgggccagcggatagagcagagtcagtgataatgcagcctcaatggcatacatccattttaccgccgccggtgtgcccgccagttcgttgacgatgatcgggaacatcagcatcacctgcacggagaggataaagtaaccggtcagtgtcagcacatagcgggagaagcgtttgtcactcagtacgcgggtcagcccctctttgaccggggtgcgggtggtggaaatgcggtaagcgggcagcagccaggcattacacagggcggtgataataaagattgccgcgcccacccagcagaccagatgaaagtcataaatcagcagccagctgccgagcagtgccccgagtaccgccccggcgctgtcctgcatcagcagaagggaatagaaacggccgcgttcatacgggcgggtcagtttgatcaccagtgcagtgcgcggcgggtcaaacagcgtgccgccgatagccgagagaatacaggaaagccagaggatccacggctcatccgccattgccatcagggcgaaaccgcctgcacggagaaacataccgatgacgatcatcggcttggcgccgaagcggtcagcaatcgcaccgccgaatatccccagcccctgctggacaagctggcgcagtcccagggcaaacccgaccacaatccccgcccagccgagttgttcaacaaaacggatggagatcagcgggaagaccacaaagaagccgagaacaaccagcaggttatccaccagcaaccagtacttacccagcgtccgggcttgtctgacaagtgacattcagcaccacattaaatattgaaaggaatagaaaaaagggagatgattacaccttctattctctgcttattcagtgtctgataacagagaattcaggatgatatttttttatcgacggaacgtggttaaacacaccctgactacggccttctgagagaggaattatgttgttcggctaccgcgcgaatacgccgcagctgcgttttaacacggacagaatggtggtccggctggcgcacgagcgggacgcgtaccgcatcagtgaatattactgtgaaaacgaagcatttctgaaaccctgggagcctctccgcgaccgcagccactatcatccttccggctggtcatcccgcctgcagctgatgacggatatgcaccgtcagggcaccgcttttcattttttgctgctggatcaggctgaaaatgaggtgatgggggtagcgaactacagtaatgtcatccgcggcgtgttttacgcctgttttctcggctattcgctgggtgaaaaatggcaggggcagcattatatgcaggaagccctggagccgacactgcgttatatgcagcgtcagcagggcatgcaccgcattatggcaaactatatgccgcataatcagcgcagcggacaactcctcgcccggctcgggtttgagaaagagggttacgcaaaagattatctgatgattaacggccggtggcgtgaccatgttctgaccgcactgaccaccccggactgggttaagccacgataacggcgggtttttctgttccgcctgcgttatcgtgatactatttccgcctttgttatctgaccagcacactcagcatgaatttattgaaatctctcgccgccgtcagctcgatgacgatgttctcgcgtgtactcggctttatccgcgatgccattatcgcccggattttcggggcatcgatggccgccgatgccttctttgtcgcctttaaactgccgaatctgctgcggcgtatttttgccgaaggggcattctcccaggcctttgtgccgattttatcggaatataaaacccagcagggcgaggaagcgacccgcacctttatcgcctatgtctccgggatgctgacactgattctggcggtggtcaccgtgctcggaatgctggccgcgccgtggattatctatgtcaccgcgccgggttttactgatgacccggataaatttacgctgaccgccaatctgctgaaagtcacctttccgtatatctttctgatctccatcgcttcactggcgggggggatcctcaatacctggaaccgtttttccgtcccggcgtttgcaccgactctgctgaatgtcagtatgattggctttgcgctgtttgccgccccgtattttgatccgccgattatggcgctggcgtgggctgtgctggcagggggggtattacagattgcctatcagctcccgcacctgaaaaaaatcggcatgctggtgctgccgagagtctctttccgtaacagcggtgtctggcgggtaatgaaactgatggggccggcgatcctcggggtatcggtcagccagatttcactgattatcaacaccatttttgcctcattcctggtgtccggctcggtctcctggatgtattacgccgaccgtctgatggaactgccgtccggtgtgctcggggtggcactggggacgattctgctgccgtcactggcaaaaagcttctccaaaggggatgccaccgaataccgcaaactgatggactggggattacgcctctgtttcctgctggctctgccgtgtgcggtggcgctcgcgattctggcggaagcactgacggtcagcctgttccagtacaaaaacttcactgcctttgatgccctgatgacacaacaggcgctgattgcctactgcgtcggtctgatggggatgattgtgattaaagtactggcaccgggattctattcccgccagaacatcaaaacacctgttaaaatcgcgattgccacactgatcctgacacagctgatgaacctggcctttatcgggccgtttaaacatgccggtctggcgctgtcgattggtatcgcggcctgtttcaacgcctcgctgctttactggcagctgcgcaaacagaatatcttcacaccgttgccgggctggggaaaatttttcctcaaactggtgatcgcaatgctgtttatggccgcggtactggtgggtatgatgtacctgatgccggaatggtcacagggcaatatgctgatgcgtatgctgcgcctgatgggtgtggtgattgccggtgccggtgcctattttgccgcactgtatgcgcttggtttccgcctgcgggactttgcacagcgcagcttataaactgtttttatcttattctgacggggctgataacaagccctgcggaatcgcggatgccggagcgtttgtatgctgcaccaacacactgtttctgatgctgaactgaacctggataacggcgggtatacgtcaattgatgcgtttatcacgccgccgtatacccggcaggttatcagtgcctataacaatcagctctctgaatatccggctgcactgcgtcactgtacgtcattacgggtactgaatctctcctgtaatcagctggcttatattccgccggatattgcacagctgactgcctgtgaaatgctggatctgggacataattgcatcgcggatgttccgccggaaataggtgaattacatcagctgcaatatctttatctcagtgaaaacggatacagcagcttaccgtcgtcattttccggactgaaaaatctgcgttattttaatgcaacggataatcaactgacagcaataccggcatggttttctgaaatggaaaaaatggaagaaatccgtctttataataaccggataacggaactgtcttctgctgtcagcgggctgaaaaatacccgcgaaatgcatctgatgaataataaaataaccgctgttccggatgagattgcagctgtggcagcgctggaaattcttgatctgaataataaccgggtggcgtttatttcgccggaaataagccggttacaacaactcaatacactgaatctgcgtttcaatgccctgaaagccctgccggaaaacaccggtgaattatcatccctgttatatctggatttacgtgcgaatcagctgagtacactgccggacagcctggcagcattaacacagctgcgcaaactggacctgcgctggaataatttctccgtcattccgccggtggcagaaaaattacaggcagcagggtgccgggtattgctgtaagagactcagaaggcaataaaaaaggaaccataaggttccttttttgcagaaataatcgccggtaatgccgggattacatcttctcgacagtaccgatacccagagtatccagaccggctttcagggttttctgtgtcagcagcgccagtttcagacggctctggcgcagttcttcgctttccgctgccagaatcgggcaatgctcgtagaaaccggagaacagacctgccagatcatacaggtagctgcacatcatatgcggcaaaccttcacgggcaacagcagtaatggtttcctcaaactgtaacagacgggctgctaactggcgctcgtggtcgtcagtcaggataataggttgtgtcaggctgtccgcatcaatatccgcacgtttgaagacggatgccacacgggtataggcatactgcatatacggtgcggtgttaccttcaaaggccagcatgttgtcccagtcgaagatatagtcggtggtacggctttttgacagatccgcgtatttcaccgcgccgataccgacaacttccgccagctgtttcagctcatcttccggcatatcgctgtttttctcacggatcagtttctccgcgcgttcaacagcttcatccagcagatcggacaggcggatagtgccgccggcacgggttttgaacggtttgccgtctttaccgagcatcataccgaacatatggtgttccagtgtcatgctctccgggatataaccggctttgcggacgatggtccacgcctgcatcagatgctggtgctggcgggaatcaatgtaatagagaacgcggtcggcatgcagtacgtcatgacggtatttcgcacaggcgatatcggtggtggtgtagaggtatccgccatctttcttgcggataataacccccatcggctcgccttctttgtttttgaattcgtcgagataaacaacaatcgcgccttcgctctcttcggcgatacggcggttcagcaggtcactgacaatgcccggcagcatgtcgttgtacaggctttcacccatgacatcatcttcggtcagggtgacattcagacggttataggtttcctggttctgctgcatggtgatatccaccagcttacgccacatggtgcggcagtattcatcaccaccctgtaatttgaccacatagccgcgcgcgcgctcagcaaatacttcgtcttcgtcgtaatgctttttcgcttcgcgatagaaggcttccaggtcggccagtgccatatcgccggcatcttcattctgcattttttcaagatacgcgataagcatgccgaactgtgttccccagtcaccgacgtggttacagcggatcactttatggcccagatactcctgggtacgtgctgccgcatcaccgatgatggtggagcgcagatgaccgacgtgcatctgtttggctacgttcggagcagagtagtcgatggcgatggtcatcggctcaaccggggtcaggcccagtttgtcatcagccagcgcggtttccagctgagtggtcagccagtcaggggagaggaaaatattgataaaaccgggaccggcgatttccgttttttccgcaattccgtcgagatccagcagttcaatcactttctcagcgagctgtcggggcggcatacccatttttttcgcggcagccatcacaccattggcctggtaatcaccaaactgcgctttggcggactgcttaacgatagcatcacaatcaagtggtgcccctgcgctgataagagcctgttggatcttatctgaaagaattgcctgaatattcaccggtttaccttaatttaaagaacaaaatgacaccccggaaacagcggcggaggagcgggctcgtccgggcgggatgttgtcgtgaaatttggctggttttataccacaaaaacagggtctcatgctactatctgcgcctttgcggatgaattctcacaggggatcataatgaaaaacagcgtacagacagcatcccttgccggtctgatggcagagctgccggtgtttgccggaaaaatacagcagtttgcggcggatttgcagcttgatctcacgcattatcaggcagatcacatctcactgcgggctcacgatacggcactggcggaacagtggctggccggattccgcgaatgcggcaccgttttatcggataatcagattaacggccgcccgatttatctgtttttactgtatgagccgctgacactgctgcactggcagattccggtggtggaactgccgttcccgaaagataaacagtatgcacaccagggctgggaacatatcgaactggtgttaccgggtgacccgcagaccctgacagagcgggctgccgcactgctgccgtcaccattaccggccggggtagtgataaaagccagccatccgcacggcgaacaggagcggttgccgaacccgacactggctgtcagccgggaaaatatcaccattaagtttcatccgtttacattgcaggagattgtcgaaagtgagcggtaacctgcaattctgacatttccctgtgcgaatcggccggatatttcgcatcttgtgatatttaacaattcattaatctaaattacatgtaatagtgtatatcaggatgactgaatcgtttacgagagatatttacctgcgaaattaagtgatgaggctaatcaatggcgaaactggaaatttgttgttacagcgtggaatgtgccctcactgcggaaaaagccggcgctgaccggattgaactgtgtgccgcgccgtcagagggcgggctgaccccgagctggggcatgctgaaacagactatcgaccggttgcggatcccggttcacccgatcctccgtccgcgcagcggtgacttttgctatacagcctcggaatttgcggttatgaagaatgatatcgccaaaatccgcgacctgggttttcccggggtggtcaccggtattctggatgaggacgggcatgttgatctgccgcggatgaagatgctgtgtaaactgtcgggcgacatggcggtcactttccacagagcctttgatatgtgtgcgaatccgatgctggcattacagcagctgaccgacctgggtgtgagccgtattctgacatccggccagcagctgagtgcggagctgggattacctctgctcaaagagttacaggaagccagcagagggccggtgattatggccggtgccggtgtgcggctggcgaatattcagaagttccttgatatcggccttcaggaagtgcacagttcagcatccaaaaccaagccgtccactatgcgctaccgcaaagtcggtgtggcgatgggcagtgacagcgaagctgatgagttttcccatacctgtgtggacggggacaccgtcgaggcgatgaaaggggttctggatctgcacagtatggtcgtgcactgatccggttcatttcaggttacatcaaaaacgccctcatactgagggcgttttgctgtcagaaggcggcgttaacgggctttccctctgccggtatcgcactgagtgagcgcggcggataaccggcaatggcatggtcagcaaaattcacggtgatgacagagccatcactgaactgtgtctgttgtaccaggccgtcactgtccagccagcggaagccggtcagggctttattccataactgctgatgcagcgggcggaaaatactgtccgattttatcatcgcaggaagacgcttctgtaccgtattacggctgaggttataaagtggcggcgtgttatacagctggctcagcagttcccgtgtggtggtaaccgccgggaatttcaggttatccagcgtccagtgatgcgtggtgatcaccgcatcatgaaatacagcctgatacagcggcaaccgccagcgcggatcaaattccgtggtcaggtagatatctttcagttttcccggtgtaaaaaagatcgccggttcattttccggccaccaggctcccagatagtaaggggactgtttgttgcggtgaatatccgcatcactccagccgaagccgcgggtttcggtaccgtgggcaaacatcagatattgcgcggtcacggcattaccgtcttccgaacccagcgggatacggatgttttctgccaccgaccgtaagcggttatttctcgctgccgccatagcatccgcacttgtgggtgacgccggattataatcatcagacaccatgccggtgccgtccacgtcaagaaacagactgttgatgccggtcagctgtaccagttcagtcatgcgtgtttctgaaaaatcctgcatgcagcccggattcaggtaataaccatccccgccgaatcccggcagttttctgcctgttccggtcacaatcgcgcatttttcgcgtaattctgacgggatctgtgccgtcagccattccgtattttttcccgaggggatggcggtgtcgtaggaatcatagctggcgataagataaccgtgctctttggcatagctgaccgcctgcggctgataccaggtagcagtccagttatcggtgcccagccagagcttatccagttttgccccggtcagtgcggttaaaagaggaagggataacccctgaccccagttggcttccggtgccaggaacggactcagttgctgttttacggcagaacggatcgcccgggcctgtgttttctgcgcagccataaagtcactgtcatccggggtgcggctcagtggtgtaactttcttcagtgcctggttgagagcatcggccagaaacggctgctgccatttttccggtgttttaccgttcagagcagcaaaagcatcacggctctgaggctccattgccgaccataacccgttaccggcgggggattgcagataacgtaccagtcccggccagtcagtaatatcctgctgatcgataatactttttccccataaatagatatgggtggcaccgatcagttttttgccgtccgggatctgtgcgaatttttcttccagtgatgtgaactgcttattatcctgtaaccagcggcggtagcgcagtgcgccgtccagcggggtatcaccggtgtgaagcagaacagtaaacggctgctgctgattaaaacggttaaactgatgtaccgcgctcatctgcaggcgctgctgtttttcctcaaagtgcagacggttatggaacgggctgagtaacacccagctgtagacccgatcctgctgctgactccagagcggtaactgcaaatcctgattggtatcgatattatcctgttcagtaaccatatagtgacgccactgttcattattcagcggaatatgacgtccttcgcccagcggcatatagagggcggaaacagtgttatccggcagggtgaaccactgaaaattctgcggctgattggtggtgaatgtcagggtcagctcggtatcattgaggacagcggtgacattcatatctctgtccggccagaaccagctgacacggcggggatattctgttaaatcactgaccggctgtttttctgttccccggctgacagtggtatccgccactgctatgtgcagggtttccgggtcgataaaaacctgatgattattatccgttaacacagtggcagaggccgcagaggcagacaacagaagcggaagatacagtgcggacaggcgatatttcatgatccggagtggcctttattcgtcataatatgacaggcagggtagctgaatccccggggagagaacagtcagtttttcggaggtatataccctgcaaatgacagggtatatacgtattactgatgactatggtttttcggcgatcagaaccgcacggcgcggtgccggatagccttcaaccgtcagtgacgggtcgtcaggattgaggaaatccgcgagagattcattgatcatccactccgtacggcgctgctcatccgtggtggtaacagattcatctgcgatccggatattggtgaatccgcatttttccagccagacagccagcatttttgctgacggaataaagtaaacgttactcatctgcgcgtagcgttcgccggggatcaggcactgatgttcatcaccctcaacaacaatactttccagtaccagttcgccgccggagaccaactgatctttcagttgccagaggtggtcgagcggggagcggcgatgataaagcacacccatggagaacacagtatcaaaagcctgaagtgcgggcagctcctgaatacccagcggcagcagatgcacgcgctggtcattgccgagcagcttgcgtacggcttcaaactggcagaggaaaagctgagtcggatccacgccgaccaccagttccgcgccttcacctgccatacgccacatgtgataaccgctgccgcagccgacatccagaatggtacgcccggcaagcggggacagatgcggcagaacgcgatcccacttcagatcggagcgccattcggtatcaatctccacgccatagagagagaacgggcctttacgccacggcatcaggttgcgcagaatgttattgatacggcgggtttccccgtccgtcagcggcagcgtacgctgcgcggtaaccccggttttcagatcgagaatgtccggggtcatgtccggcagattttcaatggtttttacccagccaggatagtagccgtgcagggactctttattccatttcgcaatctgcgcgggcagtgtttccagccagtggctcaggcgctcattttttgcaattaactgataaaaattgccgaaatcaatcatggttattctctttcactgccagtaatgacccgaagttaaagcactggaaccagacttcacaatgttcaaaaccggccgctttcagccgtgatttgtgggtttccacactgtcggtcagcatgacatcttccagcatggtgcgtttctggctgatttccagctcactgtagccgttggcacgtttgaaatcgtggtgcatgctgaacagcaaatcgccgatctgctcatcctcaaaactgaatttttccgataacaccagcacgccgcccggcagcaggccctgatagatttttttcagcagtgcggcgcggtcatccggtgccaggaattgcagggtaaaattgagaaccaccattgaggcattctcaatcgcaatatggcggatatcgccttcggttacttcaaccggtaccggggatttataactttccacatggcggcgggcgtgttccaccatcggcgcggaattatccacggcgatgatccggcagccgggtttatccgcgatattcgggcggatagacagggtggcggcagcgcgggaacagccgagatcataaacctgactgccgggcgtgacaaaacggccggccagcatgccaatcatggcaataatattggagtagcccggaattgagcgtttgatcatatcgggaaacacatccgcgactttctcatcaaacgtccagtcaccaagacgggcaatcggtgccgcgaacagagtatcctgcggcggattcggaatttctttggacataacacagatctgcaatacaaaaagatgcgcgcattctaacagaggtgacccggcgcagaaagtgttatgtcccggcgtgagcggttacatgtacggcgaaaaaatctgctgccacggcagataccagatattcgccagcaccatcaggatcatggcggtgaaggtggccgccatcccggtacgccgccagcggttctcgcggtgttttaatccgtaagagtgaaacagccggccggcaatcagaataaccccgcagacatggaccatccacacctgggcgccgttttgctccatcaccagtaacagcaggagtgcaacggggatatactcaagcgcattgccctgcacgcgaatcgccgtctgtaactcgtaaaatccgccgtcaccataagcgacgcggtaaagtgtccgcagtttaatcacatcgagtgatagtttaatgattaacagcgcacccagtacaatataaagggaactaaccattttttactccatggccaattgaaacagcaaaagaatgataaacctcaaagcagcgggtaacacaatccttaatattaatgcatactgaattatttgaaaattatcaattagtggctaaattctctgcggcagatgtgctgtttgtacttatctcatcaggaattttccactataatgatcgcctttttgacatttcttcataaagaaccatgccaaaattttgcagaaacgcacaatagcggacaaaaggatatcgtatgcgtactaattattgtgggcagctcaacagtgctcacatcgatcaaaaagtaacccttagtggttgggtaaaccgtcgtcgtgatctcgggggtttgatttttatcgatatgcgtgaccgtgaaggcatcgttcaggttttcttcgatcccgaccaaaaagaagcatttgccaaagcctctgaattacggaatgaattctgtattcagattaccggaactgtccgcgcgcgacctgaaaatcaaattaataaagagatggcgaccggcagtgtggaagtgcatgcagatggcctgaccatttttaaccgctccgagccgttaccgctcgacagcaaccacgaaaacaccgaagagatgcgtctgaaataccgctatctcgacctgcgccgcagcgaaatggcgaaccgcctgaaaacccgcgcacgcatcaccgggtttgtccgccgctttatggataccgaagggttcctcgatatcgaaaccccgatgctgaccaaagccacaccggaaggtgcccgtgactacctggtgccgagccgtgtccacaaaggcaaattctacgcactgccgcagtctccgcagctgttcaaacagcttctgatgatgtccggttttgaccgttactatcagattgtcaaatgtttccgtgatgaagatttacgtgctgaccgtcagccggaattcactcagatcgatgtggaaacctctttcatgactgcggaccaggtccgtgcgaccatggagcgtatgatccgctcactgtggaatgaaatcatcaatgttgaactgggtgatttcccggtgatgacatttgcggaagcaatgcgccgcttcggttctgataaaccggatttacgtaacccgctggaactgacagatatcgccgacctggtgaaagattctgagttctctgtatttgctgatgcggcaaatgatccgaaaggccgtgttgtggcactgtgtgtcaccggcggcgcggaaatgacccgtaaacagattgatgaatacggcaaatttgtcggcatctacggcgcgaaaggcctggcgtggatgaaagtgaacgaccgctctgccggtattgagggtgttcagtctcctgtcgccaaattcctgaccgcagaaaccgttgaagccattctggagcgcactgacgcacagaccggcgacattattttcttcggcgcgggcgcgaaaggcaccgtaaccgatgcaatgggcgcgctgcgtctgaaaaccggccgtgacctgaacctgaccgacctgaacagctggcgtccgctgtgggtgatcgacttcccgatgtttgaagacgacggtgaaggtggtctgaccgcgatgcaccatccgttcacctctccgcgtgatatgtcaccggaagagctgaaaaacgcgccggaagacgcgatcgccaatgcctacgatatggttatcaacggctacgaagtgggcggcggctctgtccgtatccaccgtaacgaaatgcagcagacggtattcggcatcctcgggatcaccccggaagaacagcgccgcaaattcggcttcctgctcgatgcgttacaatacggcacaccacctcatgcgggtctggcctttggtcttgaccgtctggtgatgctgctgaccggtaccgaaaacatccgtgacgttatcgcgttcccgaaaaccacggctgccgcctgtctgatgacagatgcaccgagcttcgcgaatgacgatgctctgaaagagctggcgattgcagtaactcagaaagagagtgactgaatctgatggcttttaaacgccctgaatctgtgctggtggttatctgtgagcaggaaacggggcgtgttctgatgttacagcgccgtgacgatcctgctttctggcagtccgtcaccggcagtctggaaccgggagaaactccccgcgatgccgcattgcgggaagtaaaagaagaaaccggtattgatatccttgcggagggactgcggctgacggattgtcagcgcaccgtccgctataccatttttccgcatttccgtcaccggtatgcaccggacgtgacgcacaatacggaacactggtttgtgttatgcttacccgcgctgaaagcggttcccttaacggagcatctggcgtatgagtggttaccggcagcggatgccgccgcgaaaactatctcacccagtaacggggaagcaattgaagaattcgttcgtcagtgtgttcttccgcagtgacagcggatttaaatgaatgaacgtcgtaagacttaatctggagattagagaatggcaggtcatagtaaatgggccaacaccaaacaccgcaaggccgcgcaagatgcgaagcgcggtaaaattttcacgaaaatcattcgtgaattagtcacggcgtcgcgcattggtggtcctgatcctgcatctaacccacgtctgcgtgcggcagtggataaagcgttagcaaataacatgacccgcgataccctgaaccgtgcgattgcacgcggggcgggtaatgatgaaaacgataacatggaatccatcgtatacgaaggttacggcccgggcggtactgctgtgatggttgagtgcctgacggataaccgtaaacgtacggtttctgatgtgcgccacgcgttcaccaaaaccggcggcaatctgggaaccgatggctccgtcgcttatctgtttacccgcaaaggtatcatttcctatgcaccgggtctggatgaggatgcggtgatggatgcggcgctcgaagccggtgctgaagacgttgaaacctttgacgacggcgctatcgacgtttacaccgcctgggaaattctgggtgatgtcaaagacgcgatggatgcagccggtttcaaagctgaatctgccgaagtctcgatgatcccgtccaccaaagcggatctggatgcggaaaccgcaccaaaactgatgcgccttatcgatatgctggaagactctgacgatgtgcaggaagtctaccacaacggcgatatctcagacgaagttgcagcactgctgtaatttccgtcactcactccgcagaggatgcgccactgtgcgcatccctctgttttcttgcttttttcctgttgtgacaatacggtcctcctatggcaattattctcggtattgaccccggctcgcgggtgaccggttatggtgttatccgccagcagggacggcgtctgctgtatatcggcagcggctgtatccgcacacaggtggatgatcttccgtcccgtctgggcaaaatttacgccggtgtcagtgaaatcatcacccagtatcagccggattgttttgctatcgaacaggtctttatggccaaaaatgctgattccgccctgaagctgggacaggcccgtggtgtggctattctggcggcggtgaataataatctgccggtatttgaatatgcggcgcgccaggtgaaacaaacggtcaccggtaccggggcggcggaaaaagcccaggtacagcatatggtgcgctcaatactgaaactgtcagcggcaccgcaggcagatgcggcagatgcactggcgattgctattactcactgtcactttaaccagaacctggtgcagatggggcagccgcgtctggtgatggcacgcggacggctgaaagagtaaccggtgtcgcagatacccgtgattttctgatggctggatatacgtccagctttttttatgctataaacaggctctgccgcaatcataaaggagacgcgcgtgatcggtcgcttaagaggtattgtgctggaaaaacagccgcctgtcgtattactggaaaccaatggtgtgggctatgaagtccatatgccgatgacctgtttctatgaactgccggatgccggtcaggaagccattctgttcacccagtttattgtgcgggaagatgcacagttactgtacggctttaatgataagcaggaacgcgcgctgttccgtgaattaatcaaagtgaatggcgtcgggccgaaactggcactggcgatcctctcaggtatgtctgcgcagcagtttgtggcggcgattgagcagggggctgtggcacagttaattaaattgccgggtgtgggcaagaaaactgccgaacgtctggtcgtggaaatgaaagaccgcttcaaagggcttaacggtgacctgttccgtgatgcggaaatgtcgcttccggccagtcagcaggcgggtaacagccaggcagatgcggaatctgaagccattgaggcactgatttccctcggctataaaccgcaggaagccagccgcatgatagcgaaagtctcaaaagccggttcagacagcgaaacactgatccgcgaagcactgcgcgccgcgctgtaataataaaaacgatgatgacacaacggggtgacaggtcatgattgaagctgacagactgattacggcggaaacgctgccggatgatgaggtggtggatcgcgctatccggccgaaattactggcggagtatgtgggtcagccgcaggtctgttcacagatggaaatctttatcgaggctgcccgtcagcgcggggatgccctcgatcatctgctgattttcggcccgccggggctcgggaaaaccacactggcgaatattgtcgccaatgaaatgggcgttaatctgcgcaccacctccggaccggtactggaaaaagccggtgatctggcggccatgctgaccaacctcgaaccccacgatgtgttgtttatcgatgaaatccaccgcctctctccggtggtggaagaaattctctatccggcgatggaagattaccagctggatatcatgatcggggaagggcctgctgcccgttccattaaaatcgacctgccgccgtttactctgatcggtgccaccacccgtgcaggctctctgacatcaccgctgcgggaccgtttcgggatcgtgcagcggctggaattttataatactgatgatttgcagcatattgtcagccgcagtgcacgttatatggggctggatatctcggatgatggtgcccgccagattgccatgcgctcacgcggcacgccgcgtatcaccaaccgtctgctgcgccgggtgcgggattttgcccaggtgaaaggtgacggcggtattgacgggctgattgccggtcaggctctggatatgctgaatgtggattctgccgggtttgattacctggatcgcaagttgctggtcaccattattgataaatttatgggcggcccggtcgggctggataacctggcggcggccatcggtgaagagcgggaaaccattgaggatgtcatcgaacctttcttaatccagcagggctttattcagcggacaccgcgcggacgccttgccaccgcacatgcctatcgtcactttggtattgatcacagtggaaacgattaagaacccggccgtcaaaccttagggtaaacataatatgtttaccattttgcccatgtgataattaaatggcttttttggggattattccgggaggatatctctgtaattggttgtttttcgacatttaaaaattggcgtgcatcgtctgaaccctgtaatgtaaaaaggaggatttcgttaaagggaaaaggaactgactatgcgtgttcattttatcattcatgactattttgaagcaccgggcgcttacgagtattgggcaaggaagaataattacgatgtcacgttcacccgtctgtatgaaggtgacaagttacctgacagcatcagcggaattgattttctgattatcatgggcgggccgcaaaacccggaaaccaccactgcgcaatgctcttattttgattccaaaaaagagcaggcgtttatcgccaatgctatcaattcaaataaagttgtcatcggggtctgcctcggggcacagcttatcggcgaagcattaggcgcgccgtatacacaaagtccggaaaaagagttcggcaaatttaccatccatatgaccaaggccggaaaacgcagccagctgttttctcatttcggcgattcgctgggggtgggccactggcattatgatatgccgggattaaccgaaggcgcgcagattatcgctttcagtgccggttgtccgcgtcagattattgaatacaccaaacgcgtttacggcttccagtgccatatggaactgacccgtgatgtggtggagtatctgatcctcaacggcgaaaatgatctgaaatctgccgccggattccgttttgttgatacaccaggtgctatccgcagacacagctacagtgaaatgaatgaaaaactgatcacatttctcgacaagctggtgctgagtgtgaatccggtgaaaccgaaagtgcggacaaaatcagaaacagcgtaataacgcggtatgaccggaagtaaaaagccctgaaaatcagggctttttactgtatatacaattaattgcgtggttttaccagcaggctgagaataaagcagcaggcggcgcacagcacaacagacggacccgccggagtgtcataaaaagcggagaaggttaatccgccggtgatggaaatcatcccggtgacaacagcacccgcagccatctgttccggtgtccgcgcaaaacggcgggcagcggcggcaggaataatcagcagagaggtgataatcagcgctccgacaaatttcatggcaaggccgatggtcagcgccgtgaccagcatcagcatcatccgcagtctgcccggattgataccgtcaacaaacgccagttccgggctgatggtcagagagagcagattacgccactgccacatcagcaagccggtcacgatagtcacacccacggcaataggcagcaaatcttcataggtcactgagagcaggtcaccgaacagatacgccatcagatccacccgcacattcgacatcagactgaccaccaccagaccgagagacagcgcactgtgcgccataatacccagcagagtatccaccgccagttgcggacggcgttccagccagaccagcagcatagccagaatcagtgtcacggcaatcacggcataaaacggactgacattcagcagcaggccaaaggcgaccccgagcagcgaagcgtgcgccagcgtatctccgaaataggacatccgccgccaaaccacaaaggagccgagcggaccggccgcgatcgccagtaaaatcccggcgagccagcccggtaacagtaattcaatcatggcggcactccggagcgggttttacagagacatctgccggggcgtgattcccgcagcagggtgcagaaggggatagcactgcactgccgttctcgtgactatggttgtgatgatgacggtacacgccgatctgtgtcgcggcccggctaccgaacatggcggtaaactccggatgggcggctaccacatccggctcgccggagcagcagatatgccggttgatacacagcacggtatcggtttttgccatcaccagatgcagatcgtgagaaaccatcagcaccgcgcagttcagttcatcacgcagccgggtgatcaggtcatacagcgcgacctggccgttgacatccacaccctgagtcggctcatccagcaccagcagctgcggccgggcgagcagggcacgggccagcagcacacgctgcatttcaccgccggacagccgttgcatcggttttccggtcagatgcgcggcattgacccgctcaagcgccgcgagacactcgcccttgctgacaccgcgcttcagacgcagaaaacgggccaccgtcagcggcattgtcgggtcgagatagagtttttgcggaacatagccgacagtcagacccggtgtgcgggtgacggtgccggacgtcggttcggtaaggccgagtaccacacggacaatagtggattttcccgcgccgttcggcccgagaagggtgatgattttcccgggggataatgtaaatgaaatgtcctcgagtaccgtattggcaccaaaagcgacagaaacatcatttaccgcgataagtgttgacatgacaaattattatcttgcagaatgaatgaaacgttataatataacattatcgcaatcatgtcacggagtttccattatgcagcaccagtcacggcacggaataaaaacagcgtttattgccacatttttgagtctggccgcacaaaccgccagcgcagatgtgttaacatcagtacgtcctatcgggttaatcgccgctgcggttgcagatggcgtcacggacacacagattttactgccggatggtgcttcgccgcatgattatgcactcaaaccgtctgacctgaaaaaaatccgttcagcggatttggttgtctgggtcgggccggagctggaaaccttcctgcaaaagccgctttcagctgttccggagcaaaaacagatcgttatcagcgaacttgagtctgttaaaccttttctgctgaaaaacgatgaagatgacgaccatgatgaggacgggcatcaccaccacggtgagtacaatatgcacctgtggatgtcgccggatattgcccggcagaccgctcaggcagtgtataataaactcctggtgagttatccggataaaaaatctgtgttggacgtaaacctgcgtaaattcaatggacaacttactgaaactgagaagaatattgctcagcagctggcaccggtgaaaacacacgggtattttgtttttcatgacgcctatggttattttgaaaaacgttttgacctttcgccttccgggcattttacggtcaaccctgaaattcagccgggtgcgcagacactcaataacatcaaattaaagctggctgagcaaaacgccttgtgtgtgtttgctgagccgcagttcaggccggcagtcattaaagcggtggccaaagggacgaacgcgaagatgggcgtccttgacccgctgggcagcggaattgcagtggatcgggacggttataccaacttcctgtcacggttatcagcacagtacgcatcctgcctggagcaataaataaggaacagaacgcgtgcaattgcagcaactggcaaaatccgccgttctggtatacaaccagttacccaaagcgcatcgcatgatgctggggatgttaactgccgcaacactgggtgtcgctgtctggcacccgtttgctgtatatcatgagcggaatgctgataacgaacaatatattgaaactgattttgcgccacctgctgacacctccggcacgcaggcaggaaccggcacggacactgataccgatactgacgatattatcaccgacagcagtgatcagctgccggatgaaggacttgccaaagagtctgatgatatcgacgaagcctccccgactgacaccgttatcccgacatcacttgaatacactgttgccagcggcgacagcctgtctgccattctgacacagtacgggatagattcctctgatgtggctttattatccaatcagtacaaagggttgcgtaacctgcaaatcggccagaccctcgcctgggagctgaatgacgacggccaactgaaatccctgagctgggcggtgaaccgccgtgaaacccgtacctatgtccgcagcggcaacggattcaaagaaaccaaagagatgcgcgaaggtgaatggcagactaaacgcctgaccggcaaagtcagcggcagcctgaatgccagtgcatcaaaagcgggactgacccgcagcgaagtgcgtgatatttccaaagcattacaatggcaggtggatgtccgtaaagtgaaaaacggcgatcgcttcactgtactgacctcccgtgaaatgctggacggcaaacaggaacagagccagatgctggctgtacgtctgcatactaacggacgtgattattatgcattccgcgccgaagacggccgtttttatgatgccaaaggcgacgggctggagcgcggcttcctgcgtttcccgaccgccagacaattccgtgtttcctcacactttaacccgcgccgtgtaaacccggtcaccgggcgtgttgccccgcataaaggggtcgatttcgcgatgccggtcggcacaccggtactggcagtcggtgacggggaagtggttgtggctaaattcagtggtgcggcgggtaatttcgtggctatccgtcacggtcgtcagttcaccacccgttatatgcacatgcgcaaactgctggtcaaaccgggccagaaagtcaaacgcggtgataaagtcgggttatccggtaataccgggcgctcaaccggtccgcatctgcactttgaagtctggaacggacaacaggctgtgaacccgctgacagcaaaactgccgcgttccggcgggctgaccggcaaagaccgtaccggctatctggcactggtaaaacagtaccggccacagctgacacttgattaatcctctcattccggcggcgggtgcacagacacccgcctgccgcattctcagtgtacagaattttaatgtacttctgatttcagataatcaataataatagatcacggtatttataatatcatgataaataagcttaatttaatacgggtatccctctgtgtataaagaaaacgatacagacagcaaagcgggctatatcccgacatttcaccgccattacctgcacccgaaatactggggcatgtgggttgcggcaggcgcactggccggtctgagctacctgccggttaaattacgtgacccgatgctggccggtgtgggccggattgccgggcgttttgccaaaggcggacgccgccgggcgttaatcaatctgtattactgtttcccggatatgccgaaagcggagcgggaaaggatcacagatgaaatgtttgccagtgcaccgcacgcctttgtgatgctggcggaattgtgccttcgcaatccgcagcgggtgatttcccgcacgcaggttcacgggcaggacattattgacgcgttacaggcagaagggcgcaatatcatctttatggtgccgcacggctgggcgattgatttaccggcgatgttgtttgccgcgcagggaaataaagtggcgggtatgttccatcaccagaaaaacccggtggcggattacctgtggaataaagcccgggttcacttcggcggacgtctgcactcccgcgaagccggtatcaaaccgttcattgccagtgtgcgtaatggtttcagtggatattatctgccggaccaggatcacggcgaagagcacagtgagtttgtgccgtttttcagcacctataaagccacactccctgctatcgggcggctgatgaaagtgtgcaaagcggcgattgtcccgctgtttccggtgtacgatcataaaaatcaccagttccatatccacgtccgcccgccgatggatgatattgacggtcaggacgacccgtatatcgcccgtcgcatgaacgaagaagtggaagccctggtgcgcccgaatatcgaacaatacacctggatcctgaaactgctgaaaacccgcaaagacggtgaagaagagccgtataaaatctataaacacaaagaattgccctgagacggggcaatttttatgcctgattacatcggggtttgtaataaaatcataatgttatcagtgctcttttgagagccacacagtgccgtaattagctatagcgtggtcactgtgtggacactttctgtcagatcccgcatcctcctttcaacggattgaacataaccgcatcctgcaaaaagtcaggtgcaaagtgcgcataggtcatcgtctggctgaggcttgaatgaccaagtaaccgctgcaatgtgataatgctccctccgttcatcatgaagtgtgttgcgaaagaatgtctcagaacatgtgttgcctgtcctgtcggtaaagagggctttgtctcttttaaaatcttcctgaaatgcagataagataccttcgggaaaagcaggtcttttttatcccggcaaatcagttcagccagttcgtctgagatcgggacaatgcgcggtttacgtgttttcgtataagtgaaccgcactttattctgaataatatgttcccgcttcagccgtacagcttccgcccagcgtgcgccggtactcagacacaaaacggcaatgttatagtcgtcaccttctaatttcttcagcaacgctgcaatttcctcactactcagatacgacatttctgtcggttgttccttcagctttttaaatccgttaaacggatgctccgctttaaataattccgtttctatcagataagtgaatacacttctcacacatgtgatttccctgttaattgtcgatgccttgatcccttgtgacatcctgagctgacaataacgggatatcagtgatttcgtgatctgtgctgctgtcgggtcagacatcaggcggcagaactgttcaacacggtatttgtgattgtgtgaatgctcctggtgttttcctatcgaattccaccacaaatctgtcagttcactcagcttacgtttatctgtcagcttcggctcccattcttttgaatggttggccatgatgtaccgttcgaaattgattgcttcgaacttcttatcaaatttccgtctgacacgttttccgttacggccagccggacgaatgtccacttcatagcgaccatctttgagtttcttaatcgacataagaaagccctccgaaggcgcaaagactttgtgaatcaatgaattcacaaaaatccagatgtattgttaaccagttttcttgtctgagcggggtgatgttgtttcgtcctgcccattgtgtgctaggactggtgctatctgaccagcctcgggattgacttcatcaaacatgaaccagtcgcgatattttctaaatcgagggtgtttgaataatttcattccagcctccattggcattttagatttccccgattcataaccatggtacgtgtgataattaatcccaattaaatcagcgatatcctttgttttcattctttcagagtcacgaataagcttcaatttatctgattgctgcattgacatataatccctaatctgcaaatctatagctaaataaaaacccaattgctaagtagcaaagggcaccaaggggctaaaaagagccacaacaagagagattaacagatgactaaggaaatcgtaaagacaccaatagcctcggattgtgtgacagaggcgaaatttgcagaaatgatcggaaaaactaagcaggcaatttctgatatgcgcaaagatggcaagttaccggttgttgagatgaaagatccgaaaggtaagcggggcgagtattacgtttatttgccagcgtggaatgccgggctgaaactggcgtatgaatcactgccggaagaaatgcgcgatggctggttagcgtggcttggtttgggtaaacctcactgctgacaggtgaaaaaatgcaacaggttaattaccagcttattcgttacaagtcgcactgttctatttatcgcggtttcagtgtccacaagctgccacgtaacgctacaagaaaaattacgcagtaccgcgttacgctgggtgatgattcctttggcaagtttgatgcattggcacaggcgacgggatttattgatagattatttgaaggcagaaaatgaagttattctgcccagcgaatatggttaactaccgagagttttatagagtaatgaaattcccgatgttaataccgctgatgatacatttacgatggtatctttcatgccggattttgttgcttcaagtaatttatcgccaaatgacggcccgatagcatcaggtgttaattttaataactctaatccctttgctgttaatacagcatcgcggacggagtgcccgaaaataattttattaacagaaatatatcctgtttgaaagagccactctgtggctgatgtaacaaagattgcctcatgatttattataggtttatcagaaggttcaacggcggtttcaggaaaaagagatgtaacttcaaaggatttttttacaggaaaactttcatacagtgaggcaagaataacaccggttacttcattaaattttacaatattatcaggagcagacatatgggaaccctctctgagcgtaataaagaataccaggctttatttgatgattataaagcggtaattgaaatgcaattatcactatctattgatcggatgagagccgctgaatattggaaacgcctgttacagcaggctgatttatcagtactttcagatgttctggcagcagtattgaatgatgctggttacaaagttctatcaaagtagtaactcctgttttggtggtcgttatgtctggttcccgtgaagaaacatcagacatggcaaatataccacacaccatgttcccgatcatggctaaaaaatcggattattaatcgttggagggggtatgaatacagcagctgatttgcaggtaacggaaggtgccgggagaggaaaaccggaaatacatcgtgcaccaagatgggacagagctgtatctatggctatagatgaaaaaattgatgggatgaatcttgctgcaaaaatgcgggcaaatttgttccaaattcagggtaagccactgaatgctggcatggatgactttatgaaagaattacgttcacacagtaataataaagtcagaaataataatcgtgttttgagtatgattttctttttagcggaaatagaaaaagaaaagcatagctttaaatttgaacaattaacacataacgaacaggtgaggtttattgaggcaattaaccaaataaaagcagtggcatcaatatttccgacagacttagcaattaagtaaataactgaaagataaataatgaccttaaccggtcagggctttttattacctaaaaatgaggttttaaaatgaaatcatttccggatccaatattcacccctgtagctgaaaacatcaaagccaaccgcgaagacgagcgcaaaaccttgcttgacgggtttgcctatcgtttacgtaccatttcccataaagcgttaagacagaaaatgacgccaacagaaatctatcacctgctcaatggtgaggctgagcgcatcgaaaacgaagcgggagagctgaaccatgtctgatgaaatcgaccgcgccaatgaccacgccgcgcttgtgcttgaaagccagatagccgccgcccgtattactgctgtgggtgtgtcagcgtttgaatgtgaggggtgcggcaaaccaatccctgagtcacgccgccgcgctgtgatcggctgcaccatgtgcattgattgccaggcaattgatgaactgaaaaatatacattaccggagcgtgtgagatggctgagaaaaccatcctcaaatgggcaggttcaaaagtcggcatcatggaacaactgcgtccgcacctgccaaaaacaaaacgcttagttgagcctttcgctggttcctgtgctgtgatgatgaatactgactatgagcagtatttaattgcggatgtgaattctgatttaattaccatgtatcaacaattagcttcagaaagtataaattcagttttatttatagcagggtcactcttcaggacagagcattttaattctgaatattacgcccacaggaaattttttaatgaaatgcgtgatgtattaacgccggtatatatagccgcatattttatttacttaaaccgtcactgctataacggtttgtgccgttacaatcagaaaggtgggtttaatgtaccgtgcggaaattataaaaaaacatactttcctgaaaaagaaatccgcgcatttgcagctaaagcagaaaaagccagtattcagcgtcttacatggcaggacacattatctctgatcgatttcggtgacggtgtgtattgtgatccgccatacatgggaaccggctttacacagtatcacaccaatggctttacagatgccgacaatgaggcactggccgttgccttaaaggatttaaatgatattcagggcaatccggtcacagtatcaaactcgctggccgcaaaagagctgtatgcagatttaggcttcaccatccacgaaatagaagctccgcgtaccattgctggcaatggcaaccggaagaaagcacctgaaattattgctgtgctgggtggttgctgatggagcagctaacacccatcgattacgcctatgtcaacggcgataagtgggaatatatcggcaccggggaaccgatgccgattttcacgtataacaaaaataccaacgaatatctggctggtatctataaagaacgccagttgtcagatccggcagaaatgcaggcgtatgtatcgcagcatgtccggtcaaaggcgctggaagctcacattagaaatgcggttgagcaggcaaaaaaagaatggaaagaagagtgtgacggatgggttaaaagccctgaaacgatagaggccagattacagaaagagccttactttatccgtgcatggtatgaacggcggctctcctggctgaagcgcagccgtgcacaaaaacacagtgatgctttcttaacgaaaaccgttaagcaagccttattgcgtctgacagaaacacgaaaacatcatactgtccggccttataaactcctgtcagcttattatcagaatctgtatccgcatctgccgggcatggataaaccgcgcattaaaaccctcgcgaatgaaatcgccgcccgtgtcgctgagatgcttgatactgagatagaacgcctcggcggaatggataaagtatctgaaaaagatgtcattgatgtgtaccggatgcttgcggctgaggtgttttctctgcgcgtgaacgtgccgggatggcaggcgttgaagccgaaaaaagaccgatgcggacgtgacaaactgccgccgattgatcctgcattcagtgaaatagcaagaatggtcagtgcggactggtgggagcgtcagttatggcggctgcgctgcgactggcgggaagatttattccgcgcgagtaatcaggttcacagaaaagcacatccgtatatcagccaggacgggatgaaagaattcactgaacagcggcagcgcaacagtgagtttttccgtaatcatgagctggaagatgaagacgggaaacgcgcttcacttcaggcaatggtactcggtagcgtcagtaacccgacattacgccgcaatgagctgatgaccagaatgcagggcgttgaatttgtggcacaggaacgcggggacgttggcgtattttatacgatcacctgcccgtcacggtatcacgccaccaatcataaaggccgcatgaatgataagtgggatcatatccgaccgccggaagcccagcggtatttatcaaaattgtgggcgaacatcggttcaaaactcggccgcaaagggctgcgagtgtacgggttccgcgtggcggaaccgcatcacgattcaactccacactggcatttactgctgtttatgcgtccggaagaaagaaaagagatcacccgcatcattcatacctatgcgacaaaaatggataaagaggaattggtgccggatgcccgcgcccgtttcaacgttaagcgcatggatccacgcaaaggcagtgcaacggcctatatcgctaaatacatttcaaaaaatatcgacgggtacgcgcttgacggcgagctggacgatgaaaccggcaaacctctgaaagacaccgctaaatttgcgaccgcatgggctagtcgttaccgcattcgtcagtatcagccaatcgggcaaccgccggtcaccgtgtggcgcgagctgcgtaaactgaataaccagcttgtatcaatcctgatgcagaacaatcaatacgaccctaaaaaacccctgctggccgataaggcaatggacaacattctcgccgctgccgatgtgggctgctgggcttcatttgttgacctgatgggcggcgtgctgacgccgcgtgaaaactatgtcatcggcatcagatatgaagacaaagacgagccaaacgcctacggcgagatagtcgaacacatttacggcatctattccagaattgctggtgaagcgtcaacagtctgcacccgatccaaaaaatggaaaattgtccctaaaaaatcaggcagcacagaagctgaagaacagggcacagataccacagacaaggggtctttggtttttcttggcggctttgccgcccctaggagttctgtcaataactctccgttagctgaaattttaaacaaaaacgggagaggaattaacagaacggtgccaacggctcagtgtgtgtttgcggttgggaaagaaaacgtttcagagggtggcgataactcgcaaccaactaaaaaacgtaagaaaaaacagcttagtaaaaaggtattgcgtgtgattactgagggcattgcgtcagtaaatacggatttgactcaggagcaggccgaaaagctggccgcagacggcagtattgaaatcggagcagaacgttacttcatttcactgaacgggagatgcctggacaatggccgcagaaaacagccattgagcaaaccgaaaccgccggtttgtgtgccgggttcatcgccggtgacaccagaaattaccaaattaacagaccagttggatgaattacttcatctgacgggtatcactacgccgccggaagcactggcacggcagttactggcaggaaaaccactgattttacgtgatgaacattattaccttgaaaacggcgtgatcagggtgatacggactgctgccgcccacaaaaagcggcagcaggtagttgcagcggagttacagaaaaaagaagcgaagcgggaacagaaagcggcgtcaatattggcgcgggttgagaaattaaagcgaggttaataatggcaggaataacagcagtaattcagggaatcggtgatgaaaatgtgagtgtgcattgagggttacagtaaaaaccaaggaactgtaaaagttaacagtggttagttgacaaagtagaaaatttgcaccattattcaggttgacaaaataaactttttgcactgaaaaggatcgtgacacgatgcaaaactactcggtaccctgggaattccatccacagctaactgcagaacgattgtctgttattgcggaaattcttcttaaagtacaggaagatacacatgacttattatcttcgatagatgatgacaattattctagagccacctgtacatttgctcgccaaaagaatcgcattaaaagattgtgtttatcaaaaaagtatagctggttaggtctgattaatcctaataatgattacacaataacaattggtggtattcctattcgttcttttacagatgaccctaccaatccgcaaagagctaatttctttcgtcgaaattgtgtagatcagctttttgcaccagaagacactattccgacaatttggcgttttgttgcagagaagccagagttcgaaggtgaaggtgggcgtgtgcattttgctggttataatgtattgggagaggttctttctttatggacttatggtgaagagcgggttgctgtactgcattcaacagatgatactccaccaaaacctgttaagattgaactagatgacattagtgcttctgttcctgaaaaggaaaagaaaagcgataacgaataatatagtaggtgaaaagtgtttaacggttctaatttgcgattggctcgtctgtatcacgagctgtcactggagcaagtagctgagcgagtcgacaagactcgccagtatattcagcggctggaatccggctcggctgtcccgactcctgagcttgcgaataaattagctgccgtcttgcgggttatacctgaattttttgaagtgcaagagcagtctccagtgaatgaagaaattgttcattttcgcaagcgtagttctacgcgtaatgcgacaaaatgggcaacacttgctaaagcagaattatatcgtcgtttgatagacgtttttgatgaatacttgaatctaccacctgttagatttcctgaaattagagttaacactcaagaggatatagaaagagcagctgaaaaatgtcggagtgattgggggttaggtttcgggccgattgacaatatgacgcgattggctgaaaaattaggagcatttgtcacttcttttgactctgtatctgatgatgtggatgctctttctgttcctttgagtcggccgtttattgtgagaaatacggcaaagaaatctccatgtcggcagcgttttgatatcgctcatgaagtaggtcatttgattttacatgaaggtatttcaacaggggatagaataacagaatcacaagcgaatcgttttgcatcggcattgcttctacctcgttcggcgatggcaaaatattttcctcgaccaataggcggtcgcatagattggcagggattgagtcagtttaaattgacttggaaagtaagtaaggcagcaacgatttatagagcacatcaactatcgcttttgactgatgctcagtataaaacagcgtttttcggtctcaagcgaaaaggggaagcgattgatgaaaaagaggattatttaattcaacatgaaaaaccagaattctttcataaggctatgaactttcttttgacgaccctatcggtagatattgagtctttagctagtcgtttgtgtatcactccggcgatgttagtagaactggcaaatgacaattcattatctgctttagttacagatgtggacgcccaaaatgttgtttccttattagcatacagaatgaaagctggttaacttaatctaaattaattccaccaatgacgggctcgttttcaattttacaaaaatagttattgaatcaatcaatattaatgatagcaataaaagtatcggacattcagtatgtgctaaaacctgatgaaaaaggtgcatagttttgcataaaaatgcacaatttccggttcatataaaatatcgcgcaagccctgacgggctgcgcgttgccccggtggcaaaacctgcacaaaaaagcacaccttttgtgtgcgggcgaggcgggggagcaatcgcgcgctgagggggatagggtgccgctctttctccgtgtgtccggcacatgaaaaaggcgtatttctgcgcctgttttacagagtgtgcgagcgtggcgggtgaaaacaaatggcacggtatcaatgatggtcagcgcggcgtgtgatgggttacgctacgcctgatacggggtgattatttactttgcgccgagggcttcaagcagggcgtactcattgaagcgcaccacctcttcaccgacccagtcattcacggatttcaggctctgcatgattggcatcagctcattgatagaaaaaactttcgcggccttttccacatccccgaagctgcccgcgccggtcggcacgatacccatcagctgcggcggcacacggtgcatggcaagcaggtcatcacgggtggcatctttcacgttcataaattcatctttggcagctatctggctgaacggcaggatctgaatgccgtcctttttcccgttggctgaataaacaaacaggttcttgaaagccccgtcacggcgtgatttctgcaatgcgcctttcagatcctcaacgccgttcgggtcggccagtgcgtcattaagataaacaatcaccccggcgtgtgagccgttctcatagtagttgacccggaatgtggtggcagatttattgagtttggcggatatcagcccggccagatattccggcagcccgtaaatctcctggttaatatccgggttgatcaggtggaaaacatcgccgcgcttaaattcatgcgcatcctgccatgtctgaacgaaataataggtgtccaggtcaatcccgcgccgtgtgtatttggccggtgatcgtttcagttgcagcagtccgccgaacatattacggcggcgctctaaatacccgttcccgaatacaagataatcaagaacgtaggcgttcatttcctgataggacagggatttatgcgggataaaacagctcatgataacgttgcgcttaaacagcagcggtgattcatgatgtaccgctgaacggaatgcgcgggcgatgctgtagaagtctaacggcgtttcataccacttatcggttttcgcgcactccatgcagtcgagcaggtcataagcaccggtgaccggcacaggattatcaaaggtgaatgcagcacactgcttgtcagcgggtaactctgctttgttggtgacgggaagtgttttcttttttttcatggttaaaactccgatacacaggatccgctgtctgcggattcactgccgataggttcagcgtataaaacgttcataacagaccaggcaatatccccgtgatcaacaccgcgtgtacggtctgacgcataggtgacaatgccgccctgtgtgataacttttttgatagtcatgaaagacgacgggatctgtgatgccccggcatcatattcaatgcgcccgttacggataagcatctgtgctttaagcaccatcatccgtttaacctgtggcgtataacggatgccctgtactgccgggtagaattttttcaccagctcatacacggcttcgccggtaccaccggtaatatcaatgttgatcccctgcacgttgtagcgcagtgtcagttttctgatttcctcggcctgtttttcaaaggccatgccacggaagcgcagcgcctcgacaacccgccatttcccgccgggaatggcaggcggggcgagcacagcgaggccgaggccgtcaccattgccgccggtgccggtcgggtcggcaccgatgcgcaccggtttattaccgagcggcctgtcggcgtaaggcttccagtccggccagacatcacggttataaccatcaacaccacggtaaataagggcgttatagtcgaatgcccgttcaccggctttaacaaacttacagttatagaggttttcgagatcgtccggggtgttctcgctttcgatatcagccagtgatatcaggtcaaacccgctgttaatcgcatcatggatagtgacaatctgccgccagatattgtccccgcacagcacaccgtttttcagggttttgtgtgtggtatcaatgctgatttttttggattcaggccgggattcattgaagaagtcacctgtccagaacggataagcctcatgctcttcagatgagggggtagagaaataagtccggcgtaatccgacctgtgacgccatagccgccgccactttgcgtagttcggcgaagttagccacccaaaagaactcatcaaaatagagatccccggtgtaggactgtgcggatgccgcagcggtaccgagaaaatagaatgttgtaccggtggacagaataattttatccccgcctttcagctccacgccgacgagccgcgcgagggcgataatgaagcctttaaactgatgcgcctgtgcccggctggctgacaggaatatttggttattgccggtttccagtgcgtgcagcagtgcctcacgggcaaaataccaggtcgcgccgatttgccgtgattttaaaatcatgcggttacggcggtttttctgcttaaaccacttcttctgatgttcaaacagcggttcaagtgccagctgccggagttgttcgatctgctcttcggtaaagtggttcttcggcgtcttcggcttcttctctttctcctgcttgtcgctttctttgttcagccgcgccatctgacggccgagaaaatccatcactttaaaatcgtgcgcggtcaggtcttttttattgaggatccgcagaatacggacatgaatctcatcactgacgcgctgaaccgggtgggtttcatcccatttatcccgtctgcgccacgaatagagcgtgttggcgctcacaccgaggtgtgacgctatctgtgaaatactgtacgcctgccagtacaggcttttcgcttccgaccgcggatcgcgctgagagtcagttatcatgcgtcaactttcccacatcgcgcgcgtacacctccacgggtttcacttgtcacaccgatgtcacaaggcaaagcttttgaaccggaaacaagcacttgcgaagatacagacacacagaattgtcgttatctccggagtgaaaacccatgccagaagacaataaaaaactacaggtcatcgtctgcaccgagggcggcacgttaaacggctttgctgtcacgcgtgaccagattcagcagatggctgacaactacaatccgcagctgtacgccgcgcgtatcaatctggaacacatcaccagtgtgttacctgacagtacatggcgtcatttttctatgatcgattctgcccgtgcatttgagttacaggacgggccgttaaaaggaaaactggcgctggaaatctccgccaccattgacccggtcaaagacgcaccattaatcgccctgaacgaaagcggccagaagattttttccagtatcgaattcctgccggactgcccgaacgatgccgcaaaaggcgcatatctcaccggtgttgccctgacggataccccggcggcattcggcacgcaggttatcaccctgagtaaccgtgagcgcggcctgccggaagatgcgaaaaatacctataccgcatcactggaaactgtcgtgaagatgagcgcagcagaaaagcagcaggcagagcagaaatcactggcagctgaattccttaccggactgaaaaaagtgctcgggatccagcgtgaaaacagcaatcacgacattgccgcgttacaggaaggtatcaacctgaccgcgaaaacctgtgcagaggcgttaacggtcatgcagaagttgactgcagaaaaagaaacgctgtcaggtgaagtcgcgactctgaaacaggaattatccgccctgaaaacgcagctcggcggcactgacgcggataacggacagcgccagctttccaccggtaacggcggttacgttcagtctgaattttaaggaaaaactgatatgtcattaacacctgaagcaaataaagcgtatctgtcctacctggacaatcaggcgcgtttaaaccatgccgtccgtgacggtaaatcactgcaattttctgttgatccgtcagtgcagcagaagattgaaaaagccgtgatggaaagcagccctttcctgaaagaaatcaactcattcggtgtgactgaacaagaagggtcaacgattctggtcgcttccagtcagccaattgccagccgtaatacgtcaaccacagaccgccgcgagcctgcacaggctttcgggatggaagaaaacacattcaaatgtgcgcaaaccaactttgacacaatgatcccgtatacccagctcgacgcctgggcggggcaccctcagtttcagagcctgattaatcagcagattattcagcgtgaaggacttgaccgcctgatgattggttttaacggggttaagtgtgcggcgaaatcagatcgtcagaaaaacccgttactgcaggacgtcaatatcggctggttgcagcttgtgcgtgaacgggcaccgcagcgtgtgatgaaaaatatctctctgacttcgcgcgatgaggacgggaaaatcatcaaaaaaggcagttacgccaatattgatgctgttgtgtatgacgcggtaaacaacctgatcgacccgtggcaccgcaacgctgccgggttggtggcgattgtcggtcgtcagctggtcacacagaaaaacttcaaaatcatcaatcagcacagccagcaaaatccgaatatggaactgatggccggtaacgagctgatgaaactcagcagcgtaggcggaattccgtctgttcaggtgccgtatttcccggatggcgctgtgttaatcaccaccatgaaaaacctgtccatttactggcagaaaggcaagttaaaccgcttcattaaaaatgagccggaatataaccgtattgccacctatgcacagagtaatgacggttacgccgtggaagattacggcctcgcctgcctgattgaaggtatcacttacgccgaagctgagagcagcggcgaataacattgtcacagccggtgccgccgggcaccggtgtttatcgggggatatgcaatgcaacagttaacacctgctcaggagcactggcaaagagtcatggcagagcgccggggcagcgaacaaacaaccgtaaacatgacggcatacgagcagatcctgcaccgtctgcgtcacgatcagtcacgcctgagcgatattcagggcactgagttcaagattgaatataagaaaacggtgttggatcagtatgaaccgtggattgacggcgttattgcggccaataccggacaggcggatgaggtttttacaaccgttctggtctggcagattgactgcgaaaactatgaccgggcgcttgatatggccggttatgtgctggcacacaatttaccgttaccggaacgctacaaccgcacaccggcggtgatggtgatcgatgaaatctgtgataaagcgctgacgctgttttctgccggtgtcggtgctgaccagctgatcccgctgccggtactggaacgcgtcagaacactgactgaataccatgatgtaccgaatgaagtacaggcaaaactctgtaaagcactggcgtacacattacgccttagtgagcagccggaagataaagcccgggcgcttgagctgttacagcgtgcgctgctgctgcacaacaaatccggtgtgaaacgggatattgaactgctgcaacgggagctgaaaaaagcggacgacagtaaacaggacgctgcgccggaaccggaaaagaaaccggcaaaaaataccccggcgaaaggtaccggcacaaaaccaaagccgggcagcgctaaaaagccaaccacggcgcggaaaaaagccgcgtcataaccgaatgcacccccgtgtgccacggcggcacgatgaggcggggttaattactgcgtcctcatcgtccaccgccgtttttttaccgaggtgatcccatgagcggattagtcgcacccaaggccgtagcgccgaccgatgaaacgacagatatcagtgacaagggcgttgtggtgacaaccatcccgttttacccggacatcacactgtctgatctgcgctgggctatgcgggttaacggcacggttaccaccgcgagactgaagcacgcggcgaccagtgccgccctgtatgtcaatgatctgctgagagaatggcaggcagcgcagacagcggaaacgctgggtgatgtgccgtcaacaccggtcaacgatgaaacccggcatttatttttataccgccaggcggtttacagcttcacaaagtcatatctgattgaaaattatcgtgatatcgacacaacccgcgaaggtgaaaaacacgcggaagccctgagtacgcagattgatgatctgcgccgtgacggacagaacgccgtccgtgatctgatggggctgcggcgcatggtggcggagctggcgtaatgaaagtacaggcacagcagggcgataccgtggatttactctgtcaccggcattaccggcgcacgcagggagtagttatgcaggtgcttgatgcgaatccgggtctgtgtctggcaaccgttttacgtccggggcagtgggtggaaatgccggatatcaccgaaccgaaacagaaagataccgttcaattgtgggattagggatggacgaattacacagcagactcacctattttttcgccacgattggcgcgtttttctccgggctttccctgtatgaaatgggctttttaatcgggctggccgtcagtattgcgctcggcgtgctgaattacctgcttaaccggcgctcgcagcagcagcgcacggcgatatgggcggattatgtggcggcactgaaacagcagggtgtcagcggcgaatccgcaaaagatttcattaccgcaccgaaacaggaattgtgatgcaacagaataacctgaatgtattcagcaaagtaatgatcggtttgttgctgggtggagccggagcgacagccattgttgatcagtttctggatgaaaaagaaggtaactcgctgaccgcgtatcaggacggcggcggcatctggactatctgccggggcgtgacccggattgacggcaagccggtaacgcgaggcatgacactgaccgcagaacagtgcgccaaagtgaaccgcgctgaagctgaaaaggcggtgcaatgggtgctacgcaatgtgcatgtgccgctgaatgatgcacagattgccggtattgccagcttttgtccgtataacatcggcccggggaaatgtttcacatccacattttataaaaaactgaatgccggtgataaacgcggtgcctgtcaggaaataaaacactggatctatgacggcgggaaagactgccggaagaccaaagggcagaaaaacggctgttacggtcaggtgctgcgtcgggaacaggaggctgcgcttgcgtgctggggtctggatgatgaataagagcggcttttcgacctatgccattgttggcctgttactgctgactgtcggcgggaaatggtactacgacaggaaaatcgccgtactgaccaccacacaccagaccacattaaacgcgctgacgctggcagcgaaacagcaaagtgatgcggcagcggaacggatgcggacagcacagcgtaaagctgccgaactggacgccagacacacaggaaaactgaaagatgcgcttgaggaaaataatcatctgcgtgatgccgttcgtgatggcgctcgccggttgcggctcaccggtgccgatcttgccacctgtgaattgtcagcaggcagaaataccggcggcggcagcgtgggcgatggaaccgaaatccgactcactgaaaaagctgaacgaactgttttcgatatcagagccggaatcatcagcgaccaggcaaaattagactatctgcaatcacgggtcagggagttggaaaaacagtgcagggtatcaccatgaaaacaatctgttatgtcattggtaccctgatttttctggctgtgtttctgatttcatcggtctgtctgctgacagataacagttgcggtactgaccgtaaaagccttgaaaagcgctgtgtcagtgcgattaaccactacagggggcagtgatgctgaaaccgaagttactgcgggaatttctgacggcgcgggagccgcgtttccggcagaatccggaatcactggaggtctacgcctcagagggaaaccttattgccaccggcagaccgggaaattccttcatgtacagctacaagctgaatctgctggcaatggattacccgaactccctggatgatttgatgctgccggtgctgaagtgggtgcgggagcaacaaccggcgctgatatttaacccggacaaacgcgagggcgggatccgttttgatgctgacattctggacaacgacacagccgacattctgatagtgctgtccgttaccgaacgtgttgttgttgagggcggagacggagaggaaaccgtaacacatctgcctgaaccggaatttaaaccgcgtcaggtgtaagggggtagcgtgagtaacgaaaccgtgttgttttcacagctggatgccgaattatcacggctgctgtcaacgacaagcccggcataccgccgccggttgtcggccaaactggcaaaagctatccggacagaccagcagaaacggatccgcagtcagcaaaatgcggacggctcaccttaccaggcaagaaaaacccgggtactgcggtcaaagcagggtgttgaatttctgtataagggcgaagtccgccgtctgcggggctggcgtaacaccaaagggcgcaacggccggatgattaccggctatgacgaagagcgcggcgcggtacggtcattcatgcggaaagatattgagcgctttctgtcaatcgacctgtcagaaacccgccgcagcacaaagcgcggtgatccgatgtttaagcggctgcgcactgcccggtttttacgggcacaggcttttccggatgccgccgttgtcggatttcagggtaaagccgctgccattgcccggcagcatcagtacggcctcaccggtgccgttaacgagctggcgcggacacagtacccgaaacgtgaattactcggcctgtcgcagtacgaacgtgccggactgctggaacttatttatcaggatttggtgaactcacgatgacactgaatgaactggaacgccttatttccaacctgttacgcgtgggcgtggttgaagaggtggacactgaaaagatggtctgccgggtcagaaccggggacattctcaccgactggatccgctggggcgctgaccgtgccggagcggggcgctcatggtgggcgccggttgccggtgagcaggtcataatcggggcggtgaatggtgaattaaccacggcatttgtgctgtgctcgctgtacagcgatgcaaacggggcaccgagccacagcgcacaggctatgcacaaaacattcagtgacggtgctgtgatcgaatacgagccggaaacaggtgaattaacggtgaccggcattcagaaagccacggtgaacgctgcgcaaaaaattgatgccactgcccaggaagtgacagtgacggccagcacgcagattaattttaataccccgaaagtggtgtgctcagacaacctgacgtgcgccaccctgaatgtggaaaaaggcggtgaaatgaccggtaactttactcataccagaggcagtattaactctaacggtgtcacgctgcatacccataaacacagcggggtagagcggggcaacagcaatacggacacaccggtatgacatacagcggctttgataaaaaaacgggtatggccatcagtgacgatgcgcatattacgcagagcatgtacgacattctgcacacgccgatcggttcccgcgtgatgcgccgggaatacggttcgttactgtcagagctgattgatgaaccggataacaaggcaacgcgcctgaaagtcatgagtgcctgttatatggcgttaatgcgctgggagccgcgtatcagcctgcaacgcattgaagtaaaaccggacgaaagcaacgtgccgaccctgtattttcagggcacaaaaaccgataaccagccatttacggcagaaattccacgggggtaatcatgccaaccatcgatatcagccagttaccgccgccggacgtgatcgaaacgttagatttcgaacagatttttactgagcgcaaagccgcattgctggcctctctgccggaagaactgcgggcgccggtcacccgtgtgctgcaactggaatccgagccgctgaccaaactgttacaggaaaatgcttaccgggaaatgctgctgcgccagcgggtcaatgaagccgcacgcgcctgtatggtggcttatgcctacggggcggatttggatcagctgggcgcaaacaacaacgttccccggctggttgtccgggaggctgacgataccgtgatcccgccactgccggccgtttatgaatccgatgctgatttccggatgcgcatcccgcaggcgtttgaagggatgagtgttgccgggccggtcggcgcttatgtttttcatgcacgcagtgcttccggactggtcgcggatgcctcggcaatcagcccggagcctgcctgtgtgaccgtcagcgtgctgtcccgtgagggtgacggcaccgcgccgccagaactgctgacgatagttgataaggcgctgaatgatgaaaacgtgcgcccggtggctgaccgcgtcaccgtgcagtccgttgaaattgtgaattattcgattgatgccgcgctgtatctgttcccgacaccggaatctgaaccgatagaagccgccgcccgggaacggctggcgcggtatgtgaaagagcagcacagaatcgggcgtgatatccggctgtcagccgtttacgccgccctgcatgttgagggggttcagcgcgtcgaactgaaaagcccggcggaagatatcgtgatcagcaatacgcaggcatcattttgtactgacgtgacagtgacggtcgggggttctgatgagtagccgcctgctgccgaccggttccagcccgctggagcttgccgccgcacaagcctgcgcagaaatagagcgcgtgccggtgccgttaaaaaccctggtcaatccggacacctgtccgctacctctgctgccgtatctggcgtgggcgtggtcggttgaccgctgggatgctgactggccggagcggacaaagcgggacgttatcaaggcgtcaatgttcgttcacaagcataagggcaccatcggggcgctgcggcgtgtcgtggagccgctcggctatctgatcagcatcactgagtggtggaaaaccggcgaccgtaacggaacattccgcctgacggtcggcgtgtcggaaaccggcatcaccgaggaaacctattacgagctggagcgcctgatattcgacgcaaagccagtcagccgccacctgctgggattgtctattaacctgagcacatccggcaatttttactgcggtgccgccaccaacaccggcgacacgctgactgtttatccgtatatcccggaaaccgtccgggtggaaagcgcgaactatctcggtgccgcgctgataaccattgataaagtgagaataaacccatgacagcaaagtatttcgctatcctgacgaactacggcgcggcacagctggcgaacgctgtcgcgctgggtacacagatgaatatttccgcaatggcggtcggtgacggcggcggcacactgccggttcctgatccggcacaaacaaagttagtccgcgaaacccgccgggcggcagtcaatcaggtatcgattgacgagaaaaacccgaatttcatcattgctgaacaggtgatccctgaaaatgagggcggctggtttatccgtgaaatcggcctgtttgatgataacggcggtctgatcgcagtcggcaacgctccggaaacctataaaccgaatttacaggaagggtcaggccggacacaggttattcagatggtgctgatggtcagctatacacaggctatcaccctgaaagtggatccgtccgtggtgctggcaacgcgggagtatgtgaccaaaagtattgatgctgcaattcaggcatcagaggctaaagccgcacagacctatcagccgattggtgattatgtcctgaacccgttctttaagctggaaatgctgaaaaagattgataaggcggatatcactcagcaactgggaaatgataccggcaaggtggtgtcacaacatttgctggcgacagaggtcggtaaattacagcctaaaggtgattatgcgactaatgctcaggtaaatgagaaacgtgcactgaataataatttattttctgaatttacgtataagcacaaaaattatcctaatgatgaattacagctgtaccgttcacaaaacggggatagcggtatattaagagtaaataacggaaaaacgggttacaccgttattcctgaagacagaaccggcattgctgcacatacaaatcaggtttttggtattggccaaaaatggtatggaatgacagaacagcggaagatagataccgtgtacacaaataataccggaaagggtatttatattgctgtctgtctggcatcaaatggcattgctggtttagtttcaatgaaaatgtatgtcgataatgttcctgtcggaacaaatcaggttcaggttctcggagaaaagggtcggtatacatatgcaaccgtgtctgcctttgttccggccggttctgcatattacatcactgtgccagctgaagaatcggcactgaatattaattcgtggtcggagatgcggtaatgcaaacagaagttatagagcaaaaatttttcaaagatatggacggtaaagtaagatgccttgatatcatgccgatgaacaaagattcgtggaaagctgaagtatctgtaggttgggtgcctatcagtaagaatgaggccgataaaattacgaatccgccgccaacaaaagcccagcttatcgaacaggcagaagctcaaaaacaatacctgattgctgaagttaacgtcgaaacccagatgctgcaaacaaaactcgccctgaaacgaatcaaagcagatgaactggaactgttaaacgcttggctggattatctggatctactggaagccgtggatacctccctcgcaccggatatggattggccgcagaaaccgtagtaaacaacaaaggggggggccctttgttatttttacaagtacacatatcatataaagatgttttaccattatcttaacatagctaattttgttgaaatttttattatatcgttctctatattatcaagaacggggattgagttacgacttttttctgcaatctcgtgtagaatgtatctatttaactggtttttatgattttcaggatctatattattaggtgaaggaacaacacagcattgccagtaataaatttcctcctcaaatagtttgagccatttattaaaatatttttcttttgagttttttttattaagaacataaacacttgtagccgctattatatccgctatctgtattccataggtagtttttgaatcagctaatattattggctcagaaaggttgaaggtaattggtactttttttttatttattgtttcgtatacgattttttcattaccaatcattgcattaaatgaatcttgttgtgtgattaatggctttgaactatcacaaatagctcttacacatccatatttgctacttatatcacataaaatatgataaagagaagtagtcgtaaggtctaaaatccatttatcgatacctgcattttctaaactaatatattcatctgtaatgatggaaatgttattcttagcaaaatcgtaaatgtcagtaataatggaagagtattctgagccatcaacaggcttaatgaattcatctatagagattttaccacgagaaaattcctcaaatcgtaagtgtagtaattcggagtattcatctttagctattaatgaagaatacataatattagaaataaataaatgaaagttaagattataaaaaatagagcttttttttgctagtacaggctcaaagatatattcaaaaaacttacctgagagagcatattttttttggttaattattacacgcattctatttttaaaatgattcaatatttcatctacagcaggttgaaaccttctgctattgactaatgtgctacctttcaactcattagaatttacagaatatttttgcatgatgtatttaacgaaatctttactttctatatcatcagtaatgactgctgcatagctaaaaaatggttgttctctagaaagtaaattatttccagtaaatcctgattcatcaaagtatatatttttaaccaatttaattatcctttttgattcgatttttattaatgctaatgttcattaccaatagatttttgtgtgcgcaattgtagcattaaggattgaccgctatcagataaagccaacattgattgactattgtttaatggaattattttaattaatccataagctagaaactgaacaatgatagtttcaaagtcataatcaattatattccctgataattgagataacgacattaatgttagtattcgttttgctagttcattgtttacatcttggctatttcggtcggttattaaataggcggagattatagaaaatattctattccatgaaatgctatattcaaactcttctgttttaattctattaaaagggtattcgccggtttcatattcataaaatccatgaataataaattcatcattaagattggcaatattatgaatcatactgctaatgttagtgttattattagataattcaattttcaatttctcattttcttttctgagttgattgatttcagttagtaattcattacttgcgacctgatttgacctgacccatccaatagcaggatatatctttatcgcatttattaagctctgtaaaactaatcctgataaagctgatgtgtcagtccaaaatttaaccaaccgtcctgttgtcaccttctttctgaatgcgagtaatttttctctgtattctggtgtactttctgatttttcaaaaggaagtttatcaggttctccgtgtaccaaagctattattttcagacctttttcaacggcatagtcaaattctttttcggtgtaactaaagccatcctctgaaactgagccatagcggccgccaattattaataaataatagtcacagtcatcaataatttttttgatgaaatcccattgttcttcatcagcagcagggaaaagctccatacccgctggaatacaatccatactcatcagtgcctgaatcacattttgacgttcttcttgtaagtctgtaaaagtggaactaacaaaaacctgatatcgcttatccataaaatttaaccattaacataaaaatagtgaaaatatgctataacggatagtgatatcaggcaaaaggtacatgaaataatgttatgtaagtcactggataggataaaaataatatactaatttcatatcgacaccggaagcatatccatcaaatccccgaattccatctctgccagccgttcgcgcagatcctcactggctttcaccagggaaatactgaactctatccgcttggctttaccgtcggaaaagaactctgcccggccttcgttcaggccgtccatgatgtacataccgtaaatcatgccggtaccctcaatcagcgggtaaggccgtccgcgataggcggcagtgcgcagaagttccagtgagatatcaccgccagtcacttccggcagcagtacaccgttcagggtgatcttatcctcacccgccccgatatactgccagcttgcggaacggccgacacggtcatttttggcataacgccagctcattgatcgctgtaagttctggtaaggtatggtttccagcataaaaacaaacataccgtaaatcatcatcatagcggttaccctatatcagtgagttgtgaccggcggcgactgtcctgagtgcgtttcagtttttccagttcctgtcgtaccattgccgcgatacttttcgcgtttgccatatccacgccgtgaaaatgcagctcgattttatctccttcctgtttaatgtcctgccgtgcagcggggcgctgcatttccatttttgccggggtgaagtctgatgctgcaatatccggagtaggtacacgcttaaaggcagatggagaacgaacagacggatcctgatacagtccgtcaactgctttaattgccgggaagtttttaaagacgatttcaccgagtttattcgggtctttcgccaccttgtctgccggactgctgaagccggaaccgtctttgtcttttttcgctgtcggatcataaacccgtgagccgtaaactgcttctgtggcttccttctgtttgttctttttctccgcctctttaatagcttcatcccacgcgccggttaatttttccttcgctttcccggcaacgtctgaaacctttttacccgcgccgtcgataaagtcactggcacctttcggcagtttccatttaggcgtgagcaggttcattactttttcgccctggcctttcagcttcgcagcatcttcggcggagagttcaacgggcttcattttgttgattttatttacggcatcctcggcggcttttggtgccatgccgagtttttccagaatccagccgatcccctttgcgacaagttctatcggagcaagcagggcgcggatagcaataccgacgacttccccgaatatttttccggctgtggtacatgcctgcattgcttcatctgaggctttaatgggtgcaaacaattcagacagccagtcccatactttttttatcgctgtccagataccatcaaaaaccggtgccagaccgccgaataccgcgctgaatgcctcaccaagcggggcgagagcggtcatcagaccttcaaagaacccaccgaaaaaggcttttacgtgatcccagtatttgtagatcagcaatgccgcgccgactactgcagcaacgacaagcccgacaggactcattaacagcgaaagggcaccggatgccattgatgcaccgagttttatcacgttaaagaatttgccgaatgcaccaacagcacccattaacccctgaccgccggttaacagagaaagactcagacgcatagctgcaaacggcagcataacagcggcagcacctgctgccagtgtgccgagagcagcggtgactgtggcaattatcagaccggctttaatcagtgcagcggataattcaggatgtgttttcatccagttaccgatactgctgattacattggtaataccttgcgccagattacgcagcggggaatcaacgctttcctgcatctgaatgccgagatcttcccaggcagattgcagttgcttcaaatcccctttcaggttgtcaattttgaccttggcgtttttatccgcttcaccgccgctgttttcgttggcttttttgagttcgtcataacggccgttcccggttgcgtcgataaccgcacccataccaaccattgcttcctcgccgaatatctcctttttaatccggatctggcttgcctggtcgaattgcttcagtgccttgccgacatctttcaggatatccccggcatcccgcagctggccgttagaatccttgatcgatacgccgagctgctccattgccttctgacctttgccgacaggggcaacaaggcgggataaaccggcacgtagtgacgtacctgccattgaaccgcggatcccgttatcagccatcgtaccggccatcgcggccatactttccagactgaccccgagctgtgcggcaaccggtccggcataagtcatcgtttcgccgagcatccgtaaatcggtgttactgcgggtaaaggtggcggtcagaacgtcagagacgcggttcatctggtcagcatccatcttgaactgagtcaggacgtttgaaccgatatcggaagcctcaccaagatccatgtctccggccagacccatattcaaaattccgggcagggcggctttaatggcttccggagtaaaaccggccattgcgagaaacctctgaccggatgccgcatcggttgccgtgtatgcggtacttgcaccgagttcccgcgcctggtcacgcagcatcttcagacgcggatcgcttttatccaggcgggtcagtgcctgaacgccggacatgccctcgtcaaaatcacgaccgggagccatgacacgggatgcggcatacagagcaccgccaccggcagcagcggctgctgcaccgcccattgccatttttccgctcagttgttttgctttttcgtactgcgcctgtgcccgggtaacggatgccagccgctggcgttgtgcctcaagctgccggttataagcttcggtacgccgggtgatttgtgctgtggcgttatcgctgttccggacagatattccgtgccggtacagctgcgccgccgcagcctgtagcttttgtttttcactgtcgagagaacggccaaggcggtcacgcgcctgccgtgcctgttccagtgcgcgtttttgttcttcagtgcgctgatttaatgccgggtagctgtcgcgcagagcctgaacttttgcctttgcctcttcgtaagccgtggtatttcgcctgactgactgtgacagacggtcaaatgttgccgcctgtgaagacaggttacggatagtgttctgagtggctcgtatctgagaggcaaaaccggcggcgctgcgctgtgcagcactcaccggtgaggtaaagttattgacggcgttgagtgctacccgaatgctgagattgcgatctgtcattcgtcctgtcctgtgcgtgccgccgcaaggccgtgccacttaattaactctgaaattgtcatttcgtcataagcggacggcggccagtggaacaccacggcgatatcggcgatcaggtcatcaatatccgtggtgggtatttcggtgattattcttccggttcgcgggtctcgtcgtccggggcactcggtgctaaaaaattcgccacctcgttaaccaactgagaaaaacaatcaaccggcattgaggaaagttcctgttctgacagacgcggctgtgtcacgcgcgggagcagggtgatcatagaattcacatccccggtggcgacatcccacattttcaggccgcgcagggttccggcctgacgcatagagtcagtaatcgtaacttcggtaatgacgttgccatttttcagagtgacagggctgttaaatttaacaatagacatagtgatagttcctgtgaataagcgttgtaatcagcgccacggcgtgacgctgcgggtcaaattaatggccgatattggcgcggtgctctgccaggcgatccacgccgtcaacgatccatttcatgttgattaaatccagctcgaaaatgtcctgaccatcagccgtgattttgcagtaggtatttttcagcgtgtatttatgctgggtgttatccccggccttggcggtgccctggtcaagttcgttaaaacgtccgcgtgtctggatctcatacgcggttgtctctccggtggcatcgtcatagtaggaaccggcaaaacggaattgcaggctgtcaatggtgccgccccactgtttgataagttcgatattcagaccgcccattgcaacgtccatgtcgagcgccccggcatcaaagccgagattgaccgccacggcaccgagcattccgccaccctgataatcttcggttttcatcgtcagtttaggtggcgtgacctcttctacttgtccaaggtaggtctgaccgttaataaacaggtcaaacataaagagttttttaggcattcccatgatttacgctcctgaacctaactgattgaataccgcaaaatattcatcggtaaaggtctgctcaaggccgaggcgctcaagaggcggcaccggcgtatatttatatttgatgatcgcgtgaccatcacgtaactgtgttgacgggttgtcggcagggtcataccagcagcggaagccgagtaagcgcccctgggtaaccagctgatcccctttcttctgaatgccgtcgataatgtctttaatcagagacggggtgagcggtttatcaacgtatgagaaatgggcttccgcgatcatgtctgccagtatttgcgcagtgcgggtgtagacctcaaagaaataaatctcttcgtcacacgtccggttgccccagaagcggaaccccatgttttttatcagggtggtaatgcctttttcgttcaggtcgttcgcatctgtatctttatcctgtagcgaccagtacacatccgcagacatgccgagaacgccgttaaccggcacgttggataatgatttgtgccagccctgttcatcgtcgatacgggcacgcaaaccggccgccacagcaggcgcgggaattacttcatttttaccggcctcgctgttgtagccaatccagtccgggtaaagcaccatcacttcacgctgactgaaatcactgcggtactccttcgcttcggcaatcgtggtgcagccgttggcggacacataagcgaatgcgcgcagcttctcagcaaaaatagccatttgcagcgccacaggctttgtgtcgagttccggggcgatcaggatgcgcggttgctcgtctgttttggcttttgctgtcagaagcgcatacaggccggtatagcggccatcggcaccattaccgccgataaccagctgatcctgagttttggccgtctcgccctctttgggctggatattggccgcatctgccacgcggatcactatcactttcgggctgcactggtcagaaatggctttcagggttttatacagggtaccggttttacctgctttcccgagcactgaacggatgcgggttacaagtacgggggtatcaagcggaaactgttccgcatcagcatcatcacccgtgcagacaacaccgattacagaggtgtttatatcgcggatcagggtggtgagtttggttgtctctttgacttccacgccgtgatgataagtcataattcagcctcacaaaaaaagaagtaacgctattgtcatgataaaaccctgctaaatcatgcgctttcacttgtgatatccgtgtgacaagcaaaagcggtacagccacgcgcgcgcgatgtgggaaagtgtccgcataaggggggcgcatgtttgaacaatattttgatccggaactggtaaagcaaccggcttttgatatcactatcggcggcaagcaggtgttaagcctgaacgggcgcatgatggggctgacactgacagacaaccggggctttgaggctgacacgctggaaatcaccattgatgatactgacgggaaaatagagctgccgccgcgtggggttgaggttagtgtcgctatcggctggcgtggtgaacctctgacacataaaggtatttttaccgtggatgaggttagtcactccgggccgcctgaccagttaattgttacagcccggtctgcggacttccggcaggacttcaacgttaagcgagaatacagctggcacgatatcaaagtcggtaaggtggtcagcgctatcgccggtcgctacaacctgacaccggcagtcagccgccaactgattgatattgaaatagaccacgccgaccagaccaatgaaagcgatatcagctttctgtcacgcatggctgaaatgctgggcgccattgccactatcaaaaacgggaacctgctgtttatcatcccgaaccgggggctgtcagccagcggcaagccgataccggaaattgtgatcacccgtgacagcggcgataagcacagctttcgcgtggctgaccgggacgcttacaccggcgtaaaggcgaactggctggatctcaacttcgggaaaaaaccggaaaccagcgtgaagcggaagaaacgtaaaagtaaaaaaccgaaaaaagaaaagaaagaaaaatcaagcagtaaagagggtgaatatctggaaggggcagagggtaacgtttttgtgatgcgtcagacctttaaaacagagacagcggcaaaacgggcggcagcggcaaagtggcttaaactgcaacgcggggcggcggagttttctatcacgctggcgcgtggccgggcagacctgtttccggaaatgcccgccacggtaaacggctttaaatcggtgattgataatcacaaatggattattgcccgggtggtgcatcagataggtgagggcggctttcagacacagcttgaattagagcttaaaattgataatgacaatatggtggatggtgataattcagacaactaatttaacgtgatataattggaacaggcaaacccccgaaccaaggttttacaatggcgtttaattgtccaaaatgcggcgccgcatcctggactcgcaccagcgagccggtaactgtagaaacgaaacgcagctatcaccagtgtcaaaatatactgtgcggctgtacttttaccaccttgaccagtgttgagcggtatttaacaaagcccgccccgcagccactgccggcaggattccgcctgccggagaatgcgtttccgaaaagccattacggcgaaaatcagttggatatgttctcaggaagcatatagcagggagtcagaattatgtttattgaagacaatggaacacgatatgaaataaaagccccttaattgaagggcgtactattaatatgtactagctaagacctgatctgacggttttcactggcagcacaccatcaaatctgacagtgtgctttgagcgatgaacggatactttgttaatgccttatataataaccgtagcagcatttactatttgtccagagtgggcactctcggttaaaactccattttttattacatcgttagtataatacaccgccgaacctgatttttttaacatatctattactccagtgttggggtgagtatcttgagctttgccaaattttccattgttatgagagataatagccacgcttggtgaaattttagataaaattcttttgcttaagttttttatacttccatgatgagggacttttagaacatctgattttaaacaacgattttttttgattaagcgattaaaaacagagcgatctgcatcaccagtcattaaatataccaaccctgaaatttcttcataatatttaaataccacactgattttatttgcatcaaactcgagaaatctcttaattgctttttctattgtaacattaccattgcgtgttaattgttttattatgctaactgctattgttacgaaaactcttccggaatatccttcaggatatgttatgttgttaaacggagtgtcctgattgacaatgtcattcacacttgttccattttgttctaaaaataattcaacctcttgcagtgaaaattcaaagttgttttttttgctaaaaatatcattcggatttaacggtggattcaatacttccatatgtctgcactttccaaatgtagaaccttcccacaataactcaacacgctggaatgctgttggtattttaacaaactgacctctcaataattttttcaatattttatatatttctggaaagtaagcagggatataaagggtatctacaataaagttattgttattgaactttccgcatatatggtcatcgtgggaatgtgttataagaaggtctattactggcgaattaatagtacatgtgaaacttgacgggcccaagtcaatatatagtggctttcctgaattaaaaacgcaacagtcactttcaagctttatagcatcaccttgtccgcaattaaatacagttaacatattccctcttattttaaaagtttagtgtgagatgtttgaaaaaatcatagactgcatatagttaattatcatacgtcaatttcagcttctggcacagagctgtctgtcaaattaggtttagatctgtgccatagctgtgtactcaaagtcaagtggcgcttataagttcttacttgccccaatggtcgtttgcttggaaaataaaacccctcagaagaggggttggattacataaaaatatcaaatgtggtcgcgatgtggacatcgcaggaaacaaatccttttgtttcatatgattagcttgctaataaacagccctgagacggggcataaaaaaaaccgcccgtcatccgacaggcggtttcatttttatctgaagaaaatcacttcacttcaagaatacggctggtattggtgctgccgaccaggcccatctggtcgccctgggtgaccatgaccaggtcgccggtgcacagatagcctttttctttcaggcggctgatagcttcggtgactgctgccaggccatcggtgtgggtgctgcagaataccggggtgacaccacggtacagtgagcactgattcagagttttttcatggcgggacatggcgaaaatcggcaggccggagctgatgcgggacatcatacgcgcggtacggccggattcggtcatggcaataatcgctttcacgccgttgaggtggttggccgcgtacatggtggacatcgcaattgcttcttccggattgtcgaaggtcatatccaggcggtgtttggagatattcacattcggcattttctctgcgcccaggcaaacccgcgccattgcttccacggtttccgccggatactggccagcagcggtttctgcagagagcattactgcatcggtaccatcaagtacggcgtttgccacgtccatcacttccgcacgggtcggcatcgggttagtgatcatggattccatcatctgggttgctgtgatcacgacacgattcagttgacggctgcgacgaatcaattttttctggacgccgaccagctccggatcgccgatttccacaccgaggtcaccacgggcgaccatcaccacatcggatgcgagaatgatttcatccatcacctgatcggtggcgaccgcttcggcgcgttcgactttggagacaatcattgcctcacaaccggcatcacgggcgagacggcgggcgtagtgcagatcttccgcactgcgcgggaaggagacagcaaggtaatcaacattaatacgggctgcggttttgatatcttctttatctttttctgtcagcgcatcggcagataacccgccgccgagtttgttgatacctttattattggaaagcaaaccaccgacggtcacttcggtcatgattttagtgcctttgacatccagcactttcagctgcacacggccatcgtcgagtaacagaatgtcatctgtcaccacatcttccggcagctttttatagtcgatcccgacgtgctcactggtaccttcgcctttgcccagctctgcatccagaataaatttatcgccgacattcagcagaactttattgtctttaaaggtggacacccggattttcggcccctggagatcacccaggatagccacctgtacgccgaggcgggcagcgatttcacggactttattcgcacgttcaacgtgatcgtccgggctgccgtgagaaaagttcatacgaaccacattggcaccggcacggatgattttttcaagattgttatcgcgatcggtggcggggcccagggtcgttacgattttcgttcttctgaggcgtattgacataaattactccgttgacctgaataaggtgaaatggtgttgataaaaactccccgccgggaaaatcgctcccggcaggaaagtgtaaaatcgattcactcctgtctgattatcgcgtatttaaaataaaaatcgagtcagcaaacgcaaaacagtgagtcagacgttatcctaccatccgttatattactaattcgtgatggtcattacacccggcagcaggaaatgtgtcaaattgacacaaatggttaaaaatcaacggagtttatctattcgggagtctttcagggcttctttgacccggcgcaggttatcgcggaatttggggccgcggcgcagggtaaaaccggtggcgaggacatcaataatcgtcagctgtgccagacgggagatcatcggcatataaatatcagtgtcttccggtacattaagaatgatggtgagagaggcttccgccgcgagcggcgagttctcggaggtgatggcgagcacggtagcgtcattttcacgggcgatacgggcgatttcaaccaggttttttgtccggccggtgtgggaaattaaaaccaccacatcaccttcggtgctgttgatacaactcatgcgctgcatcaccacatcgtcggaataaatcaccgggatattgaaacggaagaatttattcatcgcgtcatgggcgaccgccgcagatgcacccaggccgaaaaaggcgattttccgggcttgtgtcaggcaatccacggcgcggttgatggtcagcatatcgagggtgcttctgactgcatccagaccagccatggcggactcaaagattttgccggtgtatgcctcaacggaatcattttcatccacattgcggctgacatacggagtgccgtttgccaggctttgcgccagcagcagtttgaaatccggaaaacctttggtgtccagacggcggcagaaccggttaacggttggttcgctgacatccgccattttggcgagtgtggcgatactggaatgaatagctatttgtggtgcaccgaggatcgtctctgcaacttttttttccgatttactcaggtaatccagactgttacggagacggtctaaaatattcatgccactgtgccttttatattgatctgtgtgacacaccggccaccctcattttttgaaaatatactacgtaagcccgggcaaaggagaggggaaactcccccggatccggcttttttttgaaagtttgagctgtgtctgattttcattttagtaagtttgcatcaaaaaagtaattaaattacaaaactgcacacagaaagaccggcgacagagacctgtcagaatgtgcggtaacccgcatttatgtttactggccaggcgcaaacgagtacattattcgttatctctgtaacaaaattacaattccacagccacgaagagaggttttctatggcgctgacagcaacggttcccgcctgtgatttagtcattttcggtaccaaaggcgacctcgcacgccgcaagttactcccgtctttatatcagctggaaaaagccggtaatattcatccggaaacgcggattatcggggcaggccgtgcggactggtcccgtgaggagtatcagaaatttgttgaggatgcgttcaataccttcctcaacgagcaactggatccggtgctctgggaacgattcagtgcccgtctgctgttttgtaatctcgatgtgaatgagacctctcatttcaaaagcctcgccaatattattgcggaaaacaaaaatactgctgtttactatttcgcgatgccgccgggcacgttcagcgccatgtgcaaagggctgggtgaagcgcatctgaataaagaaccgagccgtgtggtgatggaaaaaccactgggtaatgatctggcctcatcacaggcgatcaataccgaagtagcgaaatattttaaagagagccagatttaccgcatcgaccattatctcggcaaagaaacggtactgaacctgctggcgctgcgttttgccaattccctgtttgtgaataactgggataaccgtaccatcgaccacgtccagatcacggtggcggaagaagtggggattgaagggcgctggggttactttgataaagccgggcagatgcgtgacatggtgcagagccatctgctgcaaattctgactatgattgccatgtcaccgccggatgacctgaccagtgaccgtatccgtgatgagaaagtgaaggtgctgcgctcactgcggaccattgatatcacgaatgtccgtgaaaaaaccgtacgcgggcaatataccgccgggtttgttcacggcgaaaaagtaccgggttatctggatgaagagggcgcgaataccgtcagccagaccgaaacctttgtcgctatccgcgcggatatcgacgactggcgctggtccggtgtgccgttctatctgcgtaccggaaaacggatgccgtcaaaatgttcggaagtggtggtctatttcaaacagccgtccctgaatattttcaatgaaacctatcagcatctgccgccgaataaactgactatccgtctgcagccggacgaaggtattgatattgaagtgctgaacaaagcaccggggctggatcataaacaccgtctgcaaaccaccaagctggatctgagtttctcggaaacgttcaaccagacacatattgcggatgcgtatgaacgtctgctgctggaagctatgcgcggtattcaggcactgtttgtccgccgtgatgaagtggaggaagcctggaagtgggtggattctattatgcacgcctgggcaatggataatgaaccgccgaaaccgtatcaggcaggcagctgggggccgatagcttctatcgccatgatggcccgtgacggtcatgcctggaacgaagtggaataattatccatctgcggtatcagtaaaggtagttaaccggttcaatatttgcgtaattatgaccatcttctgaataagaaggtggtcattttttataactgtctaaaaaataaaattatttactgaaaaataattcagcgcaccattgctgaactgcgttacttgtgctaaaaataatatgaatattaataaccggaggattctttcattgttgtcaccctgtccggggacagacaaaagaataagacatcatgcaaagcgacagtagtagcaggattaaaatccgacgttctacccatgtacttttcctttccgctatcgtatcaagcgaacactactggtacggcgagttatagctatttctcttttcgtctgacgaaccaagcgcgcctgcgtttttggtcacatcgttacatttaacgttttcgtttcgcgataaacgcacccgttcacgcaaacagtctgttttgcgccgtgaacctgtatgcgttgtccatcaggagaaataactatgatttactggatgtttttaggcttagccattattaccgaggtgatcggtacattgtcgatgaaatacgcgagtgtctccggtgacagtgcggggatgattgtgatgtatatcatgattgcctcttcttatattttattatccatggcagtgaaaaaagtggccctcggggtggcttatgcgctgtgggaagggatcgggatcctgatcatcaccacgtttagtgtgatgtggttccatgaatcgctgtcaccgctgaaactgggcggtctggcactgttaatcgcgggtatcaccctgattaaatacggcaccaaaaaagtgcagaaaaagcagcctgctgccaaaccggttcgtgcgccactgaatgagatgctgaaaggggcgtaatatgttatcgacatttgaatggtggcacggtgcatttttactgctggccgtggtactggagattctggcgaatatcctgctgaaaatgtcaaacggctttaaacgtctgtggctgggtattttatcgctgctggcggtattgggggcattcagttgtctggcactggcagtccgcggtatcgagctttccgttgcgtatgcattgtggggagcattcggtattgtggcaacagttgccgcaggctggatcctgtttaaccagcgcctcaattataaaggctggagcgggattattctgcttctgctgggtatggtgatgattaagtttgcctgatcattgcgtcacagaaaaacagcagacaacccggagttgtctgctgtttttttatgtccggaattaaaatacactgatgcaggatgtacaggtaaaattccggattataaaaatgaaaatattactgattgaagatcatgaaaagaccggcagctgggttaaaaagggattagaggaagccggatttattgttgatatcacggcagatggcagagacgggttgtatcttgctctggagaacaattaccggctggttattctcgatattatgttgcccggtatggatggctgggaagtgctgagaatattgagaaccgccaaaatggtaccggttatttgtctgacagccagggatgcagttgctgaccgggtaaaaggactggaactgggcgcgaatgattatctggttaaaccgttttcattttccgaattactggcgagagtccggaatcagctgcgtacttctcaaccggcttccaaagtgattgagatcgccgatctcagcattgatctgacccgtcatgatgtacagcggggaggcgtgaaaatatcgctgacacgtcaggaatattcactgttgcttttttttgcgctgcattcaggggagatcctgcccagaacactgattgcctgtgaggtatggggaatggattttgagagtgataccaatattgtcgatgtggctgtccggcggctcagaaaaaaaatagatgacgatcatgatcgtaaattaattgaaactgtccgtggtatgggataccgcctgaacggatcggaatgatgaaaatacgttcactgagatttaaaattgtatcattatttatgttgctgatggtggcaaacgcaggttttgtcacactgatcctttatcactctctgaaaaatgaacttgcctcaaaagatgatgacatcctgattaaccgtgccgaccaactggctaaactgatagtcagtggtattgatattaaatcgttacctgtttatttccggcggatgatggatatgcggcaggatgttattaagatagcagatgctgataatcacgttattgtggataccaacccggagataaccctgaatacccgggacaaacttaattatccggataatcaggaaacgcctttaatctcataccagaatacggatgataacatgccggtttccgtggttaattttgagattcaggctcctgaaggtaaattatatgtcactctggcaaagcgttcggttgatcgcagcagtgttttacgcggatatttacagcaaagtctgattgtttccgttattgctattcttctgatggtcgtcttcagtatatggcttatccgccggggattgcaggatattacgcatctcagccggatcaccgcgaaaacagatctgcactctctgggacagacggtggatatcagccgcttaccggatgaactgaaaagtttgggtgattcattgaatatcatgcgctcacggctgaaaaatgattttgtccggctgacacaacttgcggatgatttagcgcatgaattaagaacacccattaatgccattaaaattcagaatgaaatcacattacaaaaaacgcgcactgcggatgagtatgaagcgattatcgccagcaatacagaagagctggataaactggcaaaaataatacaaaacattctgtttatcgccagagcagagaataaaaatattaatctgaagcgggaaaccatcgttgtttctgagctggttgaggatatttatgagttactggcattttatgccgatgagaaaaatatccggctggttaataaaatatcggatgtgacggtatcagcagacaaagtattgctgatgcagattatggttaatgttgtgtcaaatgcggttaaatattcatatgaaaatacggaggttattgcctgtgcagaaaataatcatggcagcaccgtcatttcagtgatgaacaaaggtgatgttgttgcaaacagtgaacaggtctttacccgcttttggcgcggagataatgcgagaacgtcagaaggaagcgggctgggcttatcgattgttcaggcaataacagaattgcattcaggtgaggtcagatttgaacgtaccgggtcatataacacggtaaccttaatttttccggatactcatcccctttcatgacaaatttgtcatcgtcctgtcagctttaaattcagattatgcggtataacagttcctgaatgttatcaccgtgattgttgaatacagggactcatcatgaagaaaataatacgatcgtctgagattacgccggaatccgtttttatgatgaagcgcaggaatctgcttaaattattaggtgccggtacggccggattaatggtcagcccgtcagtcagcgccggtctgttttcgtggttttccggcgatgataagcccggcgttccggagacaatcttaaaagacctcagttatacaaaacctgaaaagtatcagtccggcctggcattaacgccggaggataaggtgactggttacaataatttctatgaattcggcctgaataaatcggacccggctgaaaacgcacataccctgaaaacggatgaatggacactgacagttgagggggaagttaaccggcctctggtattaaatgccgatgagatccgtcataaatttcaggctgaagagcgtatttaccgaatgcgctgtgtggaagcatggtcaatggttattccgtgggtcggttttcctctgagagatttattattatcagcggaaccgaacagcaaagcgaaatatgttgcttttgaaacggtgtacgctccggaacaaatgcccggtcaaaagagccgttttaccggaggcgggcttcagtatccgtatattgaggggttgcgcctggatgaagcacttcaccctctgacactgatggcaaccggtgtttacggaaaagaactgccgaaacaaaatggagcacctgtccggctggtggtaccgtggaaatatggttttaaaggcataaaatccattgttaaaattcgcctgacagaatctgagccgccgaccacatggaatctttcagcaccccgtgaatatgggttttatgccaatgtaaacccgcaggttgatcatccgcgctggtcacaggctacagaacgttttatcggctccggagggttaggccggacaacacggcagccgacattactgtttaacgggtatgcagaagacgtggcagaattatataaagggatggatttgcggagatatttctgatgatgaaattattccgttacccggtggttaaacttttttttcatatgacggcagtattgccactggtatggcttatttatgctgtgagttacggggtactgggggcagatcccgcaaaagacattcagcatttcaccggtattatggcacttcgtttagttattattatcgcagtgataccggtgattgctttttattttaagctgaacagtttatatcaggtgagaaaattactcggattatggtgttttttctgggcaacgctgcatctggccagctatttttttcttgaaataggtgcagaaaatacggcactctttttcagtgagatactttcccatttttatcttaatctcggtgtggctggctggttaattttgtgcctgatggcagtgacgtcgtctgaccggatacgcaacttatcaggccggtggtggaaacgaattcataatttgctgtatccgttgttgtttattgttattacgcactatattttagcagcgaagacagatacaccggaaccggccatttatctggtactggttattctggcgtactgtcatcgccggcagcagcgaagtaaagaacaagtattacccgataaaatcgggtaatacgattatgctgattgtcttctgctgttatttatcactgtaatactcataagtggtacggaaaggtacttcaccggccggttcaccgttaatatgccggagccagagccctgcggtacagttttgataggtatcccattctgtacactgaatatcattaccggtgacgatcccgatcgactccgttctttctgttcctttatccaggccgcctttctcattgtaggtaaaatggtaattactgagaagggtcggcgtggtgtaaatacgggttacccggccggcactgtcatattcaaagatcatactgtagggtttggcgagaacttcgccgtctatcactacagaatgtatattgccatcgcggtattccacagcgccgttttcggtcaggatagtgctgttgccctcaataaaattttctgtccggtagccgctaatcacttgttgtgcatctttgagcaggataatccggctgatggtcgggcgctcttttttccggccgacttcgtctgaggaaaaacggtattccatactgatggcatcagcggtttccgctccggctacctgtatatcaaaggtcatgccgtattgcatacttctgcggatgaaatcatagtgagtgatctgtccgcagggtgacagtgtcacattactggcagaaaatatcctgacatcgctgtcctgctgatcgctgtcggtgaccatggaggatgattttaccggtccgttcaggtaagaaagccccatcatcctcatatgattgagccgggtttgttcagacatcggctggcagtcagtttctgcggcataggatggcagggcgaaaacagcggaaaacagcgccaaaggcagaactgagcaggttactgtgagttttttcacgatttctccggaaagctataaattcagattcatttatttcgatggtaagggagttattccgttcaggcaaccagacaaacagacaatctgcattatttattctgaaattctcttaatgatattcgccgaaacaacagttttagaaagtcagagtaacgcatttcagtattgtccggaaaagaatcaccagataaaatcacctgcaggcagattttaaagtaatgctgctgataatatgtatgatatagctgatacagcatattcattgtgaatggcgttcagaagaggagatgaatggattgagtcagattttattatgagagaaaaatatgtaaaatgattgattacaatgaaatggtaaaaaatgaatcgatggaagatgttatcctgtttctggttgccaggcgtgaaagtggtcttatttacccggcaatagatcgttttttttatcgtcataatggcccggataaatatgagtcgtgtaatattatgattctccgcgaaacgcaccggcttctgaatgaagaaaaaataatgtgcggaggagagaaaggcggcctttatatgaaaggaccaaaatggattgagcccgattttatgtcagaaggaaaatatgagatagattaaaaaatacatgcttgttatttttgagtgcaattatgaacatgcgtattatattttattaatccgatttttcgggaaaaataaaaaaataagataaataatcatccataaaaatgaaacaatgaataatcaatacaaaaaagtgaccgccattgtgcggtcacttaacagatcaaacaggatatgcttatttcacttccggcatcagcccgataaagacagttttcttacgcgggccggtcatcaggtcttccagcttttccacgcactgtaaatagtgcggggttttcttatgtgccgccacggctgcatcatcggcataggcttcatagatataaaagcgggtttccacttccgggtcctgtaacacatcaaaacgcaggttaccgggctcttttatcgatcccagatggttttcacgaaaaacggcaataaattcatccactttgccgggtttcacattaatttccactaatgttacgttcaaaatttaccccttgttcttttcgctcaggaacagctgataagcctgtgctgcactctcaccgccatgcacaacggcacggatcgctttcatcatggcaaccgggttttcggactggaaaatattccggcccatatccaccccggatgcgccctggtcaatggcgcggaaacacatgtcgagagcttcgttttccggcagttttttaccgcctgcaatgacaatcggtaccggacaaccggcggtgatgcgctcaaaaccttcctcaacaaagtaggttttgatgatattagcgcccatttctgcagcaatacggctggcgagtgagaaataacgctgatcacgcgccatatctttacccaccccggtcactgccattaccggcataccgacacgcatccccgcatccaccattttgatgatgtttttgatggactggtgttcatgctcagtaccgatatagacctgagccgcaaccgccgccacattcaggcgtaccgcatcatccattgccaccgcaaccgcttcgttggagagttcggtcaggatggagttagcaccggatgcccgcagcaccaccggtttgttggtcgtgaccggcacctgggcacgcaggatcccgcgggtacacatcaggacatcggtatgctcaaaaagcggggcgatattaatatcaatccgctcaaggccggtggtcggcccctggaaatagccgtggtcaaaggccagcatgaccgttttattatcctgcggattaaaaatacgggccagacgcgactgcataccccaatccagcgaaccgcagcctttgagggtataaagggtgtttttttgcggcgtattaagcccgaagtctttgccgtcacggatatcatctaaatcagccatggaattctcccctggttaaactggcgcggagggtgcccgcgccattggttaaatcagcaactacatcagaaatcatagttgttaatgttctctttggtgaagatcacgcgctcaggcagtaccacaatcccgttgccttttgcttcgtagtcatagccctgaacactgttcggggagacttcaacttcaccgacaccggcgacggtaatcttatcgccgacattcagttcgccttttttcatcagtgcatcagccacggcgacagaaatttcgccctgtttgacaacatcccataacgcgaactgattaactgtgccgcgctccacatacggacgcatcacgttcggggtactgaacccgacaaccgccacatcgttacgtttcaggttctctttggcctgagccgccgccggcagggcgttggcatccggcgcgataatcacatccaggtcactccaggcattaagaataccttcggcagtctgtaaggatttggtggcatcgttataaccgtactgggtggtgacgacttcccagcccggatgctcggcttcgattttcgctttcgcttctttgacccactggttctggtcagttacggtcgggctggaatagaagaaggcgactttggctttctctttcttcacctgatccgcagccatatccaccaggatgccgccgagctgtttcggtgtgccctggtcgatataaatggagcggcattccgggttggtatcggaatcccaggtcaggactttcacaccgcgctgcatagcgcgtttcagtgacggacataacccgtccggcgaaacggcagaaacaataatcgcgtcatagccccggttaacgaagttgttgataagctgcacctgaccggacacactcggctcggtcgggccgtcgtaggtgacatcgataccgagttttttcccggcttccacagcaccctggccgccgctggtaaagaagccgacaccgacaagtttaggaataaaggcgactttttctgctgcattcgcccaggaaacacatgcgagacttaatgcagtggcgagcgccagttttttcatgatgggtttcatggttttctccatttcgtcaaatctgtgataacaaacgtgttttactctgatacgaattgcctgttgcgtttacgcgcccaccagccaaggatgtgatgtcggtgtaaagaaacggaacgaccaacaacggcaacaataagcagcgcacccgagagtgcactggagacctgatttggtacgccgatcatctgcaatccctgctgtaaaaagccgatcagcaaaacagccagcgcggtgcctaatacagagccggaaccgccgtaaatattggcaccacccagtacaacagcggtgatagcaggcatcaggaacgatgccccgagatccgcacgggcagagccgaaataggacactaaaatgacagaggcgagtgcggcactgacaccgaccatcgcatacagcagacagatagtgcgtgtcaccgggaaagcactgtagcgcgcgacacgggcattctgcccgattaaaaagacattacggcccggatgggtacggtgcagataaaaccagaacaccagtacacacaggacaaaaatgatcagcggcagcggaatgccgagtaaatcaaggttagcaaaatcagtgaaggctgccgggaagccgccgatcccctcaaaaccggtcgcaccggataatccggagagcagcagggcgcagccgccgaacagatacatggtgccgagcgtaatcaccagcgggttaaccccggtaaacaggatcagcagggcgttaatcagaccgcacagtgcgccggtcagcagagtgagcggaatagcggcaatcatcggtacaccggcctgattgaggatcccgagtacaatggcggtcagcccgatagtggaaccgaaggagatatccatcccgccgctgacaatcaccagcgtcagcggcagcgccaccagaccgatacagataaagtcactggtactgaacagcagcacattgacatccagcaggcgcgggttacccataccgaataacaggatttcgaggacaatcagcagcgccagggcaatttcccagccataacgtttggtgatgctcattttttcgcctcctgcggtgcggaaggattaaggaaccgggcatagcgctgggcgcggaggtttttctccagcgccacacgcagacggccgtcaaagaccagaaccgcgagtaaaacaaagccggcgataaagtcattccaccaggccggcaatctgagcagcaccagcacactgtcaatctgagtcataaaataggcaccgaggatagcgccgacgatggtaccggtgccgccgagcaggctgatcccgcccagcacacaggcggcgatggctttcatttcaaggccgttaccggtctgattcgggataaaaccgatttgtgaggcaaacacaatcccggcgagtgccgccatcatgccgtttacagagaaggcaatgatgcgggtgcgatcaaccggcacacccaactggcgcgcgccctgtaagttatcgccggtggcgtagaaaccgcgtccggcggtggtgcgggacaggaacagagtcatcagaataatcagcaggataataaaccagccgattggcgacagcccgaggaaaaccggttttgacagatctttcagttccgccggtaaaccttcaatccattttccgccggtgagcagcagcataatgccgcgatacagcccgagcgtaccgagggtggcaacaatggcggggatccgcagccaggtgaccaggatgccgttgaagaatccggccagcagaccggcagcgacagtcagcaggatcgccaccgtcagcggcagtcccgcattcagcgcgataccgacaatcactgcacacagcccggtggtggatccgacagacacatcaatattacgggtcagcatcaccagggtggcaccgatggccagcagcatctggatttgcgcactgccgaaaatcatggtgacggtttgcagactgaaataacgggtttccatgccgccgagcaggacaaacaggcagagaatagcaagcagtgccgttacttcacggttattctggatatatttcagcatgatgcagcctcctgtaacgggctgctttctgtttctgtctgcgggcggtgttcgccgaacgccatatgcataatggtgtcggtgttcagctcgttgtgctgcaattccccggagaattccccctgatgcatcaccagcacgcggtcagccagtgccaccacttcatcgaggtcagaggaaatcagtaaaattgccacattctgttgtgcgatactttgtatcagctgataaatgtcattacgggcgccgacatccacgccgcgtgtcggctcatcaataatcagcagtgacggattggcttcgaggcatttggcgatcaggatcttttgctgattaccgccggacagcgtacgtaccgtctgttgcccgtcactgaatttaatattgagggcgcggcggtaacgctcgagcaatgcatcatcccgcgagcggttgaccagcagcccctggtggttatgcaccagcgcaccgatattccaggtgagcggggcatcaagaaaaagtccggaggcctgacggtcttcaggtaaacagaccagcccccgggtgaggcgtttttcactgctgacaccgcgcagattgtcaccgttgaggaaaacctctccggcgatcagcgggcgcagcccgtacaatgtttctgcgagttcggtccggccggcgccgacgacaccggccagcccgaccacttcccccgggttgacaacaaaactgatgttacggaatccttcgccgcacgcattgcggacatccagtaccggcgtatcatcctgcggactgttacgggtggcggacagatccagccagagcttctgcgtctctgacagcggctttttcttcgcttcaggtgtgatggcctgaataatttcatcagtggaaaactgttttgccggaccggccaacgcgatatttccgtcacgcatcacgctcaggtaatcggcaatggcatgtatttccggcagtttatgcgagataaagacaatcccgacaccctgctgctgtaattcccgcacccgctcaaacaggcgttcggtttcggcgggggtcagagatgctgtcggttcatcaagaataaggatgcgggaatcccgcatcagaccgcgcatgatctccaccagctgctgatccgccacattcaggctgcccgcccgcgcactgagatcaaaattgcagcgtagtgaagtcagcatctgctgtaatttggctttgcccgcctgatgtttcggcagacggaacagaatgttttcctgtacagacagattcgggaacagcagcggctcctggggaaccagatacagccccagctgatgggctttcgccggagtcaggtgcgatatctcctgaccttccagcgtcagggtgcctgcatccggctgttcaatccctgcaataattttcatcagcgtggattttcccgcgccgttgccgcccagcagcgcatgaacctgtcccggcaacagtgtgaaatcgatgtgtttgaggacaaccacaccggagaactgtttggctattccgcgggcggtgagcagcggctgaatcgggtgttgcttctctgacataacggcacctctggtgttatgggtattgctgccggatgttatgtggttaagaaaacatcaataaaatgaacatttataatttataaacacatttgttcataaatgtaagccataaaaatcaaataagacaatatttcggccatattttgtgaaaaaatcagatctgcgttagaatttgttcaaaattttggcctgcacctctggcagatttctgtaaaaggtgcttatctgtaaaaacggaaaacaaaagttcacatgacaacagtttcaaaaaacacgaaagcagccccggtaagctccgtttcttcgatggactatgacgcctcaggacttagtatgaatgaagaagagttattggcccgtattgcctggttttattaccacgatggtctcacgcagggagatatcggggatctgctcggtctgacacggctgaaagtttcgcgtttgctcgaaaaaggacgtcagtccggcgttatccgggtgcagataaattcccggtttgaaggctgccttgaacttgaagatattctgaaaaaaagattttcgttaaagcaaattcgcatactcccggcactgaacggtccggaaatccatacccgtcttggcgtggccggtgcacatctgctgatgtcacagctttcgcccggccagttgctggcagtcgggttcggggaggcggcaatggcgacattgcagcatctgagcgggtttgtctcttcgcagcagatccgtctggtgacactttccggcggcgtcgggcagtacatgaccggcatcggccagcttgatgccaactgcccggtcagcattattccggcaccgctgcgggcatcaagtgccgcagtggcagcgacattccgtcaggaacgcagcgtgcaggatgtgctgatggcagccagtgcagcggatattgccgttgtcggcctgggcgctgtgaatcagaaacaggatgcgaccattatgcgttccggctatatcagcagcggcgaacagctgatgctggcacggcgcggggcggtcggggatatccttggctactttatcggccgcgaaggggaactgacagaagaagtggagatgcaccgcgaacttatcggcatcacccccgcagagctgaaaaatattccgacggtggtcggggtggcgggcggtgaggaaaaagccgaggtgattgtggcggcactgctggggggctatatcaactctctggtgacagacgagcagacggcacgggtgatgctgacattattaacctgatgcactgactgtcccgcagacgaaaatcacgctgtatttcatggtgtaacggtatcagtccaattgaatttgtgaggatggcgacatgaatcagattacgggcagcggctcatcagaaaaatacctgatggcgctggatgcgggaacaggcagtatcagagccgttatttttgatcttcacggcaatcaggtggcggtcggacaggcggagtggcgtcacaatgagctgccggatgtaccgggctcgatggaatttgatctgccggtgaactggcagctggcgtgtcactgtattgcgctggcgctgaaaaatgccggtctgcctgcttcggcgattgccggggtggcggcctgctcaatgcgtgaaggcattgtactgtatgaccgcaacggcgaaccgatctgggcatgtgccaacgtggatgcgcgctcaagccatgaagtcagtgaattaaaagagctgtacgataacacttttgaatatgatgtttatcagtgctccggccagactttagccctcggcgcaatgccgcgtctgctgtggctggcacaccaccggcctgatatctaccggcaggcgggcacactcaccatgatcagcgactggctggcctgtaaactgaccggcgagctggcagttgatccttccaatgccggcaccaccgggatgctggatctgaaaacccgtgactggcggccgggcctgctggaaatggccgggctgcgcgcggatattctctcaccggtcaaagaaaccggtaccgtgctgggctatatcacagcgaatgccgcgaaagagtcgggtctggcagaaggcacgccggtggtgatgggcggcggggatgttcagctgggctgcctcgggttgggcgtggtcagagcgggacaaactgcggtgctcggcggcacgttctggcagcaggtggtgaatttacctgcaccggtcactgatccggatatgaatacccgcatcaacccgcatgtgatcccggggatggtacaggcggaatccatcagtttctttaccggcctgacgatgcgctggttccgtgatgcgttctgcgcggaagaaaaaatcatcgctgaacgtctcggcgtggatacttactcattactggaagatatggccgcccgggtgcctgccggctctcacggcatcatgccgattttctccgatgtgatgcggtttaaatcctggtatcacgcggcgccttcctttattaacctctccattgatgcggaaaagagtaacaaagcctcgctgttccgcgcactggaggagaacgctgcgattgtttcatccctcaatcttgatctgattgctaaattcagtggtgtgaaggctgattcactggtgttcgctggtggtggttcgaaaggcaagttgtggagccagatcctggcggatgttaccggggtaccggtgcgggtaccggtcgtaaaagaagccacggcgctggggtgtgcgatcgccgccggagcgggtgtcgggttatatgatgatatggtgacggcgggtgagcgtctggtgcagtggcagcatgagtatcagccaaatccggcacaccgtgaagtttatgacaaagccaaacagaactggcagaaggtatatgcggatcagctttcgctggtggattccggcctgacaacatcgatgtggaaggcgccgggattaaaataaaccctcatttcagtaaaaagcagagataccgtgtgtccgggtaaacctgcgatgatgggcaaaggaaacgaaaagcatgcgcgtcatggatgacgcgcctgagcgcacagggatgtgtttacagcggcttttcgtttttgcccgtcatcagcagagacactgaattaacagagatctctgctttttcaacacttagacagccgcgatcactttgatttcgactttataatccgggtgcatcagagcagcttccacggtgcagcgaaccggcgcactgcctttcgcgacccatgcatcccaggcggtattcataccggcaaaatcggctttgtctgccaggaaaatggtcgcatcgaggattttgcttttatctgaaccggcgcgggccagaattttatcgatcgcgtgcagggcactggtggtctgggcagtaatatcgccgctcagatcttccggaacactggtgtaataaacggtgttgttgtgtacaaccgcttcagaccagcggtcttccggatcaattcgctgaattgtcattctctctcctgtaaatatatccagtttcttacacggcaaggtggtgctattgctcaacccttggcataattagcgcctattttgtcagaagagaacgcgcgtgtcagacgattttgcaaaaaacggccgcttagcccgtgtcattcccggttttcagccgagggaagcccaggtcactatgtcggcggcgatcagccggataattgaaacgcaggggcaactggtggcggaagccggaaccgggaccggcaaaacgtttgcctatctggtacccgcgctgcgtgccggaaagaaaactattatttccaccggctccaaagcgttgcaggatcagctctataaccgcgatctccccaccattattcaggcgctggattatgacggcagggtggcactgctcaaagggcgctcgaactatctttgtctggagcggctggagcagcagactctcggcgatattaatatggagccggaaacgctcacgcagatagtggcagcgcggcgctgggcaacagcgactgaactgggggatatcaccacctgtcacgatattccggaagatagcccggtctggccgttgatcaccagtaccaacgataactgcctcggcagcgactgtccgcagtataaagaatgctttgtactgaaagcccggcgcaaggcactggaagcggatgtggtggtggtcaaccatcatctgtttatggcggatcgcgtggtgaaagacaccggtttcggggagcttatccctgaggcggatgtgattatttttgatgaggcgcatcagatcccggatatcgccagtcagtatttcggtcagcagctcagcagccgtcagttatttgatctgacccgcgatatcacattagcctaccgcagcgagctgcgtgaccaggcgcagttacagaaatgcgcggatcgcctgacgatgagtgtgcaggatttccggctggcactcggtgataccggttttcgcggtaatctgcgggaactgctggcacagccgcagtttcagcgggcgctcaccttgctcgatgatgcgctggaactctgttatgacgtgatgaagctctctctcggccgctctgccatgctggatgcggcgtttgaacgggcgaccctgtaccgcaaccggctcaaacggctgaaagatgtttccatccccggttacagttactggtttgaaagctatggacgtcatttcctgctggcactgacaccgctgaccgtagaagacaaattccgcgaaatgatgagtaatcagaaaatggcgtgggtatttacatccgcgacactgtcggtgaatgatgatctgcaccattttacccgccgcctcgggctggataacgccgaaaccctgatcctgccgagcccgtttaattatcaggaacagactctgctctgtgtgccgcgttttctgccgtcgccgaatcagtacggtgcggcaaaacagctggcggaacaactgcgcccgctgatcaaccataaccgtggccgctgtttctttttatgcacctcacaccagatgatgcgtgatctcgccgccgaattccgccagtcactgacactgccggtgctggtgcagggggaaaccagtaaaacacagctgctccgtgattttatctcctccggtaatgccttgctggtggccaccgccagtttctgggaaggggtggatgtgcgcggtgatgcactgacctgtgtcatcatcgacaaactgccgtttaccgcaccggatgacccgctgctgaaagcacgcatggaagattgtcaggtacgcggtggcgatccgttccgtgatgttcagatcccggatgcggtgatcagccttaaacagggggtcgggcggcttatccgtgatacggaggattacggcgtgattgtgatctgtgataaccggattgttatgcggccttacggggaaatcttcctgaaaagtctgccgccgtcgccacggacccgttcactgaccaaagctgcggaatttctggcagcacggcagtcacagcgccgcacagcggaataacactgaatcagtttcgcaataaaagtcactgttaccgtgatttttttgttaccataaaccttatttatttgccggagttatggcatgtccagccgaattttagccttagatacagcaacagaagcctgttctgttgcactttacaacaatggtgagatcaccgccgattttgccgtcaccccccgcgaacacacacagcgcattctgccgatggtgcaggcggtgctggcacagcagaatctctctctccgtgatcttgatgcactggcctttggtcaggggccgggcagctttaccggcgtgcggattggtgtcgggatcgcgcagggtctggcgctgggcgctgagctgccgatgatcggtgtctcatcactggaaaccatggcggaaggggttttccgtactgccgggctctcccgtgtgctggttgccattgatgcccgcatggatgaagtgtactgcgcggcgtatgtccttgatgagcaaggtattttccggcaggaactggcggaagcagtgctgaaaccggctgattttgtcacccgctgtgccgcactcaccggcgaatggggactggcaggcaccggctgggcggcgtatccgcagatgcaggaaacgctgaccctcagcacacaaatgacagagattacgctgccgcatgcacaggatatgctgccgcctgcactgaatgcactgcgccgcggggaaacatctgcccctgaatcggcagagccggtgtatttgcgcaacgaagtgacctggaagaaattaccgggccgggaataacgtaaaaaaatagcctgtgtcaattgttgaaccggcaatcatcagccacaataaatgaatactatccgtcacaggagctcatatcatgatgaatcgcttacggggcagtctgaagtatggtgttgtgattttatcactggcgctggccggctgcgccacagtaccggaatccattaagggcagcggcaccacgatgctgacggattttcaggccgttcagaaagcgccgcaggcttacaaagggatggaagcgcgtttcggcgggcgggtactcagcgtgcagaatcagccggatatgacacaactggaaatcgcggtgatgccgctgaacagcaccggtgcgccattcctcggttcaacgatcaccggccggatgtatgcccggatcaacagttttatggagccggataacttccgcgaccagtatgtcacggtggtcgggctgatgaacggtacacaagccggtaagataggcgatgttccttatactttcccggtgattgatgtcactggtttccagcgctggcaccaggcacggcaggtgattatgccgccgccggtgtatggtccggatccgtggcgctggcataacgggtactacggcggcggctattatggcggcggctggtattatccgccgggaccggcagtggtgcaggattatttagtaccttaatcgcgcggatttgcgggtacggtaaccttaaagttcagcataaatgcggatttgagtgtataatcccgcccgtgacgataagcaggaatgattatcctcagcttgttacagtgaatagattaagaggcggcatttgccgcctcgattgttatctggctttataaaacaaattagtgatgtgactctcaacctgaaacagaaaaattatccgaaaacgccgttttatgtaaatactttatttatgtaaatattttgttaacaccggcgggtcatgagatgagcagcaataatcaggagtaaaaccttggaaagagtctggcttaaacactatccggaagatgtcccggcagatatcaatcctgacacctatgcctcaatggcagagatgctggagaatgcggtatcgcgctttgcggaccagcccgcctttatcaatatgggcgaggtgatgacctaccggaaactggaagagcgaagccgcgcatttgccgcttacctgcaaaacggactggggctgaaaaaaggggatcgcatcgcgctgatgatgccgaacttactgcagtatccgatagccttattcgggatcctgcgggcagggatggtggtggtgaacgtcaaccccctctatacaccaagagagttagaacatcagttaaatgacagcggctgtgccgcgattgtgattgtttccaattttgcacacaccctcgaaaaaatcgtttataacacgccaatccgccatgtgatcctgacccgtatgggtgatcagctttcccgtccgaaagccacgctggtggattttgtggtcaaatatatcaagcgtctggtaccgaaatataacctgccggatgctatctcattccgccgcgctatccatcagggttaccgcatgcagtatgtcaaaccggaaattcaccgtgaagacctggcatttctgcaatacaccggcggtaccaccggggtggctaaaggcgctatgctgacccaccgcaatatgctggcaaaccttgagcaggcgcgggcggcctatattccggagctgaatgtcggcaaagaactgattgtcaccgcactgccgttgtatcacgtctttgcactgacagtgaactgcctgctgtttattgaaatcggcggccgtaatctgcttatcactaacccgcgtgatgtcagcggaacgattaaagagctgagcaaatatccgttcacggccattaccggggtaaacaccctgtttaatgcctggatcaacaatccggaatttcacaaactcgatttctccaccctgaatctttctgtcggcggcggtatgccggtgcagaaagcggtagcggaaaactgggaaaaactgaccggtaaacatctgctggaaggctacgggctgacagaatgctccccgctggtcgccggtaacccgcataacctgaaaagttacagcggcagtatcggattcccggtaccgtccactgagatccgcctgatggatgatgacggcacggatgtacaggaagggcagccgggtgaaatgtgggtccgtggtccgcaggtgatgaaagggtactggaaccgcccggatgccaccgccgaagtgctgaaagatggttgggtcgccaccggggatatcgcgcagtttgatgagaacggttttttgcacattgttgaccgcaaaaaagacatgattctggtgtccggtttcaacgtctatccgaatgaagttgaggatgcggtcatgctgcatccggcagtgctggagtgtgccgctatcggtgtggagagtgaaagctccggtgagactgtgaagatttttgtggtccgtaaagataaatcactgacagaagatgatttgcgtctgcactgccgccgttatctgaccggttataaagtcccgaaaatcattgaattccgtgatgaattaccgaaatccaatgtcggtaaaattctgcgccgcgaactgcgcgatgaggaaaagcacaaaacggatgttcagccggttgcatgacaccacatcaggccgcagaataataacgccggttaaaaccggcgtttatctgttctgttatgactattgattgaaatatcctgatctgttgaattattctgtatcacatcacttaaccacgtcgtcaaagactaagagaagttgttttgaattatcagttgattaccagcgatacacaccttgccgcctattgcggacaggttaccggcaaaccttatcttgctctggacaccgaatttgtccggatacgaacctattatccgcatctcggtctggttcagctttatgacggggagcatctcgcactggtcgatccgctggggatcactgactggacaccgctgaaaaccttactggctgcaccggatatgatcaaatatctccatgccggaagtgaggatatcgaagtctttttcaacagcatgggatgtgtgccgcagccgctggtggatacccaggtgctggccgcctttaccgggcatccgctctcctgcgggtttgccacgctggtggaaacctacctcggtgttaccctggataaaagtgaatcccgcactgactggctggcgcgtccgctgacagaaaaacagtgtgaatatgcagcggcggatgtgtattacctgttgccgctggcggaaaaactgacagaaaaagtccgtgcggccggttacctggcttctgcggaagaagagtgtgccatgatggcgcagcgccgtattacccagactgacccggcggaagcttaccgcgatttcagcggtgccgcacaactgcgtccgcagcaactggcctgtttacagaaactggcgcaatggcggctggaacaggcgcgtcagcgtgatatggcggtcaattttgtggtacgtgaagaacatctgtggaaagtggcgcgctatatgccgacctcgctgggcgagctggacggactggggctgaccggccaggaaatccgctgtcacggcagacgcctgctggcgttaacggaagaaagccgtgcactgaatgaggctgattatccggctcccgtggaaaatgtgtccgatcatccgttataccgcaaaacatttaaggcgattaaagcacgcattactgagctgagcgaagcggaacaattcagtccggagctgctggcatcacgccgtcagattaaccagtatctgaataaagtgtggggatttaaaacgtcatccgaagagccggaactgctgaacggctggcgtaaaccattgctggagactgctctggcagaggtggttgccggtattgaggtcagtgctgtctccggggaataaacagcaaaaaacacggcggggtaacccgccgtgttattatcagtcactaaaactactctttttttgcagtctcgtctttcttcgtgccttcatcgccttcaggcagcgtgacgttcagttcaagaacggatatatcatcgcctttctgctcaaactggacagacagcatctccggatcgacctgaacatacttgcagataactgccagtaaatcgcgtttcagatccggaaggtaattcggttcagattcaccgcggcgacgctctgcaacaatgatttgcaaacgttcttttgcaatattagctgtcggtttttttctcgacaggaagaagtctaacagcgccatggtttaccccccgaataagcgttttaagaaaccttttttctcttcctcaatgaaacggaaaggacgatcttcacccagaatacgggcgacggtatcgtcataagctttacctgcatctgattcctgatccagaatcaccggctcaccctggttggatgaacgcagaacagactgatcttccggaatcacaccgataagcgggatgcacaggatttccagcacatcttccatactcagcatatcaccgcggctgacacggcccggattgtaacgggtaagcagcagatgctctttaatcggctcctgtccctgttccgcacggcgggatttggaggacaggatcccgagaatacggtcagagtcacggacagatgaaacttcagggttggtggtaataatggcttcatcagcaaaatagagcgccatcagtgcgccgctctcaatccctgccggggagtcacagatgatgaaatcaaagtccatctcacctaattcgttcagcactttctccacgccttcgcgggtcagtgcatctttatcgcgggtctgcgaagcaggcaggataaataaattctcagtccgcttatctttgataagtgcctgatttagtgtggcatcgccctgaataacgttcacgaagtcatacacgacgcgacgctcacaccccatgattaagtcaaggttacgcagaccgatatcaaaatcgatcacaacggttttctttcctttctgggcaaggccggtcgctatggccgcgctggaagtggttttgcctacgccacctttacctgaagtaacaactaaaatgcgtgccatggaattattccttgttaaaggtctatattagattgttgatagtgagttcattattaaccagactgagtttggccgctttcccggcgaattcgcccgggatttgatcactcagccaatattgtccggcgatagaaatcagttccgcatgcagatgggtgcagaaaatctggctttccgtatcacctgccgcaccggctaacacacgtccgcgcatcagcccgtaaatatgaatattaccatccgcaatgagttccgcgcccgcactgacattggcggtcacgataaggtcactgttcggggcataaatgcgctggccggaacggacaggcacattaatcagccgggtcttccggcaggatgaatctgcggcggatgatgctgccggtgtttcaggctccggcgcttccggttcagcaacacgggcactcttgccctcattgagcagcggaagcccgcttcgggttgcggcccggcgcattttctcatcctgacagccgctgatcccgacaatccgcaaaccggcgtcagtgacggcacggcagataattttcaggttcgcgccggatgaaatctggctgacattaagcacaacaggagcattttggaaaaaggccggcgcctggctgactttttcgcgcacagcctgttcaataatctgaggatcctcattattcagatgaagaaccgaaagtgtgaagttactgcctttaagatcaattggcgatggtgacatctgtccgactcagtataattagcggcccgctattcagccatatataaattgcattgcagcgacgcaatgccgggtaacgatattatcaaaaacaatagcatgttatagttagtgccatttactggcaagtcacgatttgatttaaacgggataattccaatgttgtgtgcaatttacagaagtccgaaccgcgatcaaacctatttgttcatcgaaaagaaagatgatttttcccgtgtcccggaagagttgctgaaaagtttcggcaagcccgtcttcagcatgctgatcaaccttgcaaaccgcgataaactggccaatgcggatattgagaaagtgaaacaggaactgacagatgccggttattatctgcagttcccgccaccggtggaagatctgttatcggaataccgggatacactgaatattcaggataaatcctaataataatccccgcgaaataaccagaaaggatatcgctatgcgcctgacattattaagcgccgtgattattacggcatcgctgacggcatgcagtgcatctcagacaccggtatcaccggccaaattaacggctgatgctccggcagtgcagcagccggccgctgcacggttgtccgtggcggatttacagcgggaatttccggctgactcacggacagcagaacaatttccggcctatgctgaacagctgaaagcgatggcacgtcaggagggtattaaagaatccacactgacccgcgcttttgagaattttcattttatcgaacgtgttataacgtctgataaaaaccagcctgagaaaaaagtcacgctggatgattacctggcccgccgtgtgaccaaaggcgctgtcagcgccgcagtaaaacagcatgatgccaatgcggcgctgctatccggtatcagtcagcgttacggcgtgccgcaggaatatattgtctccctgtggggactggaaagtggtttcggtcgttatcagggtaaagaagatgtgatttccgccctggcaaccctggcctatgaaggccgccgcgaagagatgtttattaaacagtttatcgcagcactgcagattatcgaccagggacatatcccggcagatcagcagttgaaaggctcctgggccggagccatgggacaaaaccagtttatgccggccagctatttgacttatgccgtggacggtgatggtgacggcgtggtggatatctggaataacaaagcggatgtgtttgcttccacggcgaattatctggccactgaaggctgggtagaagggctgccgtggggatatgaagtgactgttcccgcaggctttgaccgcagcattgagggaacaaagaaaaaccagagcaaaacactggcgcagtggaaggccctgggtgtgacactccctgcacaggcaaacctgccggaatcgaccccgatgtggttagtcgtaccggaagataagcaggagcgggtgtatctggtcacacagaactttatcaccatcatgcactggaaccgctcgtatttctttgcactcagcgtttcgctgatggcagataatgtcggtgcggaaatccgctgatgtcatcagaataataaattaaaggggtaagactatgtatcagcatcgtgactggcagggcgctctcctggattttccggtcgggaaagtggtatgtgtggggctgaattatgcaaagcatgttgcggagatgaaatcacaggcatccgcagaaccccttctttttattaaacctgaaacagcactgtgcgatctgcgtcagccggtcgccattccgaaagagttcggcgaagtgcatcacgaaaccgaactggcggttctgatcggcgcgccgctgaaacaggccaatgaagatcgctgcgcccgggcgattgccggttttggtgtcgcgctggacttaacactgcgcgatgtgcagatgaaattaaaggcggcagggcagccgtgggaaaaaagtaaggcatttgacggctctgcaccggtgtccgggtttattccggtcaatgaattcccggatccgcagaatgtcaccctgagcctgaccgttaataatgaattgcgccagcagggaaatacccgcgaaatgctgacgccggtgataccgctgattagctatatgtcccgctatttcacgctgcgtccgggggatattatcctgaccggcacaccggaaggtgtcgggccactggtatcgggcgatatgctgaaaatctctgtaaatgatcacatgctgaccacgcggattatctgaaacgggtcagccacgaagtaaaaggaaaaaagaacatgtctcaaccattctggacggtgaaaaccctcgatgaaatgagtgacgaagagtgggaatcactgtgtgatggctgcgggcaatgctgtttgcagaaactgatggacgcagacactgatgaaatttatttcaccgatgtggcctgcaaccagctggatattaaaagctgccagtgccgtcattatgaagaccgtttccgctatgaaccggactgcatcaaactgacgcgggaaaacctgccgacatttgacgcctggctgccgatgacctgtgcttaccgcctggtcatggaaggcaaaccgttattaccctggcacccgctaatcagcggatccaaatccctgatgcaccagaaaggcattaccgtccgtcacatagccgtcaccgaaagtgtggtacagaactgggaagaccatattctgaataagcccgagggcgagttttaactgattgtttacaacgcgggacatagatggggcattttgcgctgacgtgctccatctgttccgcaataaatatttattatacatttgaaacatggcatatttaagtttagttttgatggataggtcatgtgttgtgagtgagccataacgaaatgtaatctcagtcagcaccagaaaacagagtaataaatttttcagtatcccattcttttatatcggagacctgaccgtcgccgatttctatcagacgtaattcaccggctgtattttccgtaatatccacagagaagaaaggtgtggtaatgatatctgcaatttcccggacaacaggcgggatattatcatcagcagagaaagcctgaccattcagcacaaaatagcggcgttcgctgtcagttttataatattcatagtgcctgaggctgatacctccttcaatttgtccccggtagcgaaaaatcagccggataatttcgcggatctcatcagcgtttgcagcaagtgatccgcgtgatgtggtcagtgatttaacatagtctttaacaaaataccccggccactttaattgtgaggtcagggtatcgaaatcagcatcttcggttgtgaagattgtttctgctgtataatgacggcaaaaatcataccagccggtaatatgatgattttgcaaatattcctcaggggacaccagcatattaccgccacaggtcgtaacagcatgatgtaagtgccggtattcttttccggtcagcatccacccgcgccagattaccgggctgtcagctgaaatattgccggaaaagcggtatttaccgtcagataccgcttcctggtcaagtaacagacaggaaaccccctgttgctgtgcacagcgatattcctcagcaaaggtgtcgtcaggcagatagttgccggtgtagtatccaggataaataatttgcatatcattcctctgaatatcaaacccagtgacgggcagcatttttcatcatggtaacaattctttgccccggaaacagataaaagtgcaccggaaaaaaatatccggtgcatttttcacgacattcctcactgcttattattttgtactgacaacggcaatatagcgcaggcgatcacgattctgccggaaatggcggaacatctgtaaaaactgcgggcggttctcttttttcagggcgttgcggatgattttcagtgtgccggcaagtccctcatcgtgcagcatacctttcggtgtcatcagtgtcatcgcaccctccgagcggatcacatcacggaaacctgcgtcacggaacagtgccagccagtcatcactcagcatcggttgtgctttgacatgaatggcagcctgcatttcctgcgtgacactctcatcctctcgccgctctgtcagcgcgatatcgtgggtcagcagacgaccaccgggcttcagtacccgcagatattcctgtaacagacgggctttggctttgtccgcatacatggtcagcatggcttcattgataaccacgtcaaaatgattatccgggaacggcagttttgaggcatccgcttcctgtacggtgataaggtgtgacaacccgttagcgaggatatttttccgtgcattggcaagtgcctgtttatccatatcaatgccggtaatatgacactgaaaacgctgtgcgatttcaatggcggtggtgcccatattgcaggcaatttccagtacgcggctgtcggtctgtaatccgctgtgtgccagcagccattctgtggcggtgcggccccccgggcgcagacgttttttacccagacgcgccaaaaatttgtgtccggcttcatgaccggtatgtgtactttccattattcagtcctgtttgttttccggttcacgtaacatcaccagcagcatttttgcccgctccggcgcgtccacagcatggggaatattggccggcatacggacaatatccccgggttttgccgtcaccggttttccggcgatggtcaggatcagagagccttcggcaatcattacaatggcatcaaacggggcactgtgttcagagagtgcctgacctttatcaaaagcaaacagggtgatattgccgccgccgtttttggcgagaacgcggctggaaataccctgttcggtgtagttcaccaggtcagcaatcactaatgcttctgccggggtaatcgtgttattgctcataataagtatccttgtagttaatcaggtaataaacatagagtcagcggaacagagggatcactccgcaggtctgccggtgcggatgattaaccggcacgacagaaaccggaagctgatatagctttcccagattttcttcagtcagcagtgcgggtgtctgaccaaactgcgcctgtgtaccgtcaaacagtaacaatgagtgatccgcaatatgcagggcatgctgcggataatgactggtaaacaggatggttttgccgcgctctgcagccagcattttcagaacggaaagaaccgtatcctgatttgccagatccagcgcggaagtgggttcatccaggatcagaatgtccggttcaccggccagtgcgcgggcaatcatcaccatctgtttttcaccgccgctgagcaggttaaatggggtgtccgcaaagggggttaatccgaggtcagccattgcctgttcagttatgtcgtgatcacggcgggacggggacgcataccagggcaggtggcgaaccctgccgaggctgaccatggtgcggacagagtaattaaacagcgcgccgctgagttgcggcacataggctgccggtgcactgagctgcacagtaccggttgcccctttttgcaggctgagcagcagacgcagcaaggtggtttttccgcggccgttcgggccgagaatggcggcgatagtacccggcggctggcggaatgtcagtccgtcaaataacggacgtttgccggtgtggtaactgagctgattaacacggatcacaggtctgccacctttttattcatggagtgaatgagcagggcgaaaatcggtgccccgatcagtgcggtgatgacactcagcgggatctccgcgctggtcatactgcgcgccagggtatcgacggcgatcagataaatcgcaccggtcagggcactggcggggagcaggacgcggtggtcatgtccgctgatcagtcgcgcgatatgcggaataatcagcccgacccagccgatggtgccggaaacggccacggtggcgctggtgatcagcgtgacgcagaccaggatagtccagcgggttacggtgacgggcagccccagcgcctgtgcgttttccccgccgagggacagcacattgatgcggaagcggagggcaaaaataatcccgcctgcgatgatgacaaccggcagtaacacgctcactttcaggtaggttgcagtggcaaaactgcccatcagccagaacacgatggtttgcagggtattattcggatccgcaaaataggtgatcagcgaaatcagggcggcaaaaaaagcgttaataatcactcccgcaaggatcagcatcagaagactgctgccgtgccggttaagccccagtaaaaagaccagcacaatggccagcagaccgccgagaaaggcaaaactgatagtgataaataaagaggagaaaagcagcagggccagtgcgccgcccagcgctgcgccggatgaaacaccgataatctgcggccctaccagcgggttgcggaagatgccctgtaatgcggcaccggcaaccgccagcccggcaccggccagcccggcgatcagaatgcgcggcagacggacatataacaccacattttcagcggtgcggctgtattctgcagacgggctgcgtccggtcagggtatccgccagaatttgtagaaccgttgtcacagagaccgcatagcgcccggcacacagcgcgagcacgatggtcagtaatagcagggcggataacaggcaccattgcagacgggattttcgcatcacggccgccccatcagtgtcagataatcacggccttcccggttcagatcgagttgtaaaatgcggtctgtttcttcatcggttagagaatagccgtacagttgcagatagcgtttgcggatctcttcccgcagcggaaatgccgcactttccggatgaaaaatctgagccagccactgccagtaaagcggcgtttcctgatttggcgcatcccagataaagccgccgatcggcagtttatagacccgtttattctttaccgcggtcacatcactgagcatcggattgttataaatatcagcgggtgccagtccggcctcaaaattgcccagcaggataatgtccggatcccacaccagaatctgctctatattcagggtgcgcggcccggtcaggtcacggttgaggctgacacccccggcgagtgcaaaatccgcattgttatgagacgtggatccgaaagtctggatactctgtttaaaatgagagagatagagcacacgcggttgtttgtcttccggaatcgcagcaacactgttttccagctggttgatcacctgtttgcgccaggctatcagcccgtccgttttggtttctttgccgagggttttccccatcagggtcagccactcctgtgtataggcttctttgccgtaatccagtgtggcaacggtcagaccggcattgcgcatcggcgtgataatgtcatcgccccggtgtccccattgccagaccagatccgggttaaccgagagcagggcttcaatattcggtgcgaaatcattccccaccacatcactgcgtacagagagcacatccggaaacatcacactgagcatgccgtcgcgggcagcgacaccggcaaagggatgcatcccggcgagccgtttgctgctctcatcaacactgaccagcatggaggcggcaggaatcgggatcaccacaatccgctgtgccggagcggcgagttcaatattctgctgtgacatatcggtaaaatgcacggcaccttttgcggcataagctgctgttgtgcaggtaaaaaacagtaccggcaataatgtaaatctattactaatcataaggttattcgccttttattttatgattaaattgataatgcgattggttatcatttataattgcatttattctggccgcactgagaggaaaaccctatgacatttgtcaaaaagacccttgcccccgcacagcaaatggcgatcctccggtcgtgcccgttatttcaggcggcagaggatgatgatctgacgctggtactggcagacagcacacatcgtcagtttgcggcgggggaattgattagtcgtgaaggggagacagtaaaagcctgtccgctgatgatcagcgggcagattgatgttttccgtcacacctggtcgggtgaagagaaagtattcggtatgtttaccgccggtgagctggtggcgattgctgctgtctttatgccgcacaatcgcttcccgatgagtctgcgggcgagaacagacagctgcgcgctgatgctggataaacaggcgattttacggctgtgtcatgcctgtccggcaattatggcgcagttactggcacggttcagcctgaagctgtatgagaatatcaaccatatcgactggctgacctccagctccgcagagcagcggctggcagcttatctgctggatctgaaacggtgtcagcaatcggattgtgtggtgctgccgttatcgcgcgggcagttagccgcaaaactgggtgtccgctatgaaactctcagccgcctgttttccggctggcggcagaaagcgtttatcggaattgataaagacgcggtgcggatcaccaatgaatcctatctggcggaactggctatcccggcgcagcgcccgttctgaataaataaaaaaatccccgccgggcggggatttcttatatcagtaagatcagaaattataggtgataccgccgttgacactgaatcccatccccgggaacagagtgctgtctttgccggtgactgagcggttcgctacagaggtggtcgcatagtgttcgttggtcaggttatccattgacatatagagcgaccagttatccgcaggctgataagtgcctctcagcccgagcaccgcatagtgtttgcgcttctgaatattgagatggttttcgtgatcgacggccatgtcggtcggtgcccagtgaatattcgggccgaaacgccagtcgccgatccggtacagcacttccgccgagacaatattacgcgggattccggcgatataattgccgttatattcaccgcccataaaacggaaatcattccacgtccaggccagcttatattccacatctccgggacccgccgggatcacgccgttaattcctgcttccagcccctgatgacgggttttggcggcataattaaagacgccggtgatatttccctctgaatcataagttgtgatgtattcatctttgataaagctgcggtagagcgccacattccatttcagctgttcggtaatatcaccgtcaccgccgatttcaaacgtcacgcctttctgcggatccagttttgtcaggcggccgtcagaggaattaatgatttcatggaaggtcgcgggctcctgactggcgctgacgttggcaaaccagcgctgattatcagccggacgccagatcaccccggctttaggggtccagaaggtccagttctgatccagtgaaacggaactgttgcgcttttccgtatcacgccgcgcatgagtggctttgagatccagattcagggtcagatccggtgtcagatgaataccggcaccggcggaggcataaatattgtctgctttgccgtcaaacttaccgatcggtgttttgtccatcttcgtgccgcgccggttctgcatcagatcggtttccaggctcatatgatcagccgccagtgctgcccgccaggagaccggctcggtttccatctgccagcccagctgcataccttcactgtggctctgactgaaacggtaataggcaggggtggtgaaattatcgtgggtacggatataccagacaccggcactgatgcgctgattatcgatctgccagtccgaacggttggcggcacggaattgctctacattgcggtgcggatcccgcagccagaccatcgggtaaacctctgtcgggtcactgtcgagcacggcttcagagaccggcccggcgacatcaaagcgcagatcggtccagttgagggaggtgcggttctcaaaattatcaccggtatagccaaagttaccgcgcacggttttgcgctgtgatgaggagtgtttgcggtagccgtcgaaatggtcataagtgaaattgatgcgtccgtcgaaacggccgtcatccgatacgccgccgaatgccgtctgtaaaccttcgcggccgtaagaaccgtattcatagcgcaggcgtccgccttcattgcggccggtataggaaatcagatccagctcaccgcccagactgttactctgcgggttcaggctgttggcgccgcgccggacactgatcatccgcgcatcccgcatttccagggtgctgatatgaaaactgccgtccgcatcggtgaccggcagtccgtcctgcatcagcagaatgccgcgtgccagcggggcactctgcacaccggagccgcggatattcagccggggctgatcaataccgccgaagaaattctgcaccagcacgccgggctgataatccagtgcatcatgcagcgtcgccagccgggtatccttttcaaccataatcaggttggtgccgcccgcgacattctccagtttttctttttcctgtgcggcatccggtgcgagacggctttgttttgcagcggtgacaataagggtgtccggtgcgggttccgctgccgcagcggagacaccggcagtaagtgagagcgcgaggcagtgtgtcagcctacggcgggtgattttgttctgcattatccctgacctcataaatataatggttatcattttcatttgaggtcataacatagtgcagaaaatgcggcttaccctatgacatttgtcaaaaagtcccgtccggggattatttcagccccagacgttttgccagacggtgcagatttccggcatcaatcccgagacggcgggccgccgctgcccagctgccgtcactgcgggtaagtgccgtgcggataagttccgtctgaaaggcatcggtggccgtgcgcagatcctgatcggcctctgcagagagtgtttctgggctgacaaccggttcagggatttcttccggcgagaagtgatgaggctgtaacagcagctcttcactgttaccggtagctcgcgccaacacaatggcgcggtgcacggcatgttcaagctcccgcacattacccggccagtgatagtgcagcagcgccaggcgtaacgcgggacttatcaccacctgcggcagaccaaacgtctgacggtagcgttcgcagaaatagccggtcagcagcagtatatcttcatggcgttcccgcagcggcggcacctgtaacgggaaaatgctgagccggtggaacaggtcagcccggaaacggcctgcggcaacttctgcccgcagatcccggttggtggcagccagcacgcggacattcacccgcagcagcctgtcatcaccgatccgctggatatcgccatactgtaagacccgcagcagtttggcctgtaacgccggcgacagctcaccaatctcatccagaaacagggtaccgttatccgccatttcaaatttgccgctgcggttgctgatagcaccggtaaatgcgcctttgacatgcccgaataattcactttccgcaacagtttccggcagcgccgcgcagttaagatacaccagcgggtgatcacggcgggcggatagttcgtgaatggactgtaccaccagctctttaccggtaccggtttcgccgctgaccagcacattcatatcagcaccggccacaatggctatctctttctttaactgcatcatgcagggtgaaaggccgataatatcggtttgtctgccggattgccctgccgccagcccggcggaggcgctgaatgccagttgctggttctcgagctgaccgataagcagggcattattgagtgctccggcggccagagcagcaatcaggcgtaattcttcatcactgaatgcatcaaactggtccggtgcaaggctgtcgagtgtcagcgcaccgataagattttgtccggcaaacagcggcagaccggcgcaggcgtgcactttcagatggacatgatccgggatcagaccgtcataaggatcaggcaactgactgtctgcgggaaaacggacgacatccccggcacgggcgatggcttccagtctgggatgcgcatccagccggaagcggcggccgagaacatccggcgacagcccgtcaatcgccagcggaataaactgatgtgattcataacgcagcagcgcggctgcatcacaattaagtacccggcgcagcgtggagaccagacgctgaaagcgatcctgatgaccgatatcccgctgtaaggcaatagcaatgccggtaagtacatcaactgaaaatcccatgcgttcctccgctgtcattatgacagtacaatgtcataatgacagttaattgcatagtcattttgacacttattttttgtcctgaaatttaaaatctttataaaacaacaaagtaaaagttggcacgcaaattgattatctctctgtaacgaagcataaaaacagaaggtaactatcaaatggctattcatgtaaaaaataatgtgcattgggtcggacagcgtgactgggaagtccgcgatttccacggaacagaatacaaaaccctgctcggcagcagctataacagctatctgatccgcgaagagaaaaatgtcctgattgatacagttgatcacaaattcagccgcgagtttgtgcagcatctgcagacacaaatcgacctgaacgatattgattacattgtgattaaccatgcggaagaagatcacgccggggcattaaccgaactgatggcggcgatcccggacacgccaatctactgtactgaaaatgccattgattctattaacggacatcatcatcacccggaatggcattttaatgtggtgaaaaccggggataccctggatatcggtaacggcaaacagctgatttttgtcgaaaccccgatgctgcactggccggacagtatgatgacctatctgaccggagatgccattctgttcagtaatgatgcctttggtcagcactattgcgacgagcgcctgtttaacgatgaggtggatcagactgagctgtttgagcagtgccagcgttactatgccaacatcctgacgccgttcagccgtctggtgaccccgaaaattactgaaatcctcggtttcgggctgccggtggatatgatcgcgacctcacacggcgtggtctggcgcgataatccgactcaaatcgtggagtggtatctgaaatgggcggcggattatcaggaagatcgtatcacgattttctatgacaccatgtccaacaacacccgcatgatggccgatgcaattgcgcaggggattaatgaagcggacccggatgtggcggtgaaaatctttaacgtcgcccgcagcgataagaatgacatcatcaccagcgtgttccgctcaaaaggagcgctggtgggctcatccactatgaataatgtcatgatgccgaaaattgccggcatgctggaggaattaaccggtctgcggttccgcaataaaaaagcagcggctttcggcagctacggctggaacggcggagcggttgaccgtgtgcagacccggctgatggatgccggttttgaaaccacgatgtcactgaaagcaaaatggcgtcctgacctgaatacccttgaagagtgccgccaatacggacgtgacctggcgcggcagtgggcgaccggggtattaccggcggtcagcagaccggcagctgcggcaccaaaagcgatcacgccgcaaccggtggccgccccggcagccgctgttaatgataccggaaaagcaaaatcatgtgacagtgtcaccaatgtatcatctcaggacttggggccgtgcatgcagtgcggtgtgtgccagtgggtttatgatcctgagaaaggcgagccggtgcagggcgtggagccgggaacaccgtggtcctgtgtaccggataatttcctgtgcccggaatgctctctcggtaaagatgtatttgatgtcctggcgacggaggccgcatgagtgcaggtattgtgattatcggcgggggctttgctgcccgccagctggtgaaaaatatccgtaaaaccgatacacaggtgctgctgacggtgattgcggcagacagtatcgatgaatataacaaaccggatttaagccatgtgataagtctgaatcagcgtgctgatgatcttatccggcagtcagcacaggaatttgcacagcaatataatgtggcgctgttcccgcatacccggatcagcggcattgatgcacaacagcatcttatcagcagtgatcagcagcaatggcactatgacaaactggtgctggcgaccggggcaacaccgggccgtccgccggtgcccggcaatgaactgatgctgacacttaacagccgcgaggattttcagcggcacgaaacacagctgcgtaatgcacagcgggtactgatccttggcagcggcctgatcggcacagaattggcaatggatttctgccgggccgggaaaaccgttaccctggcggatatggcggccagtattttgtcctcactgatgcccgctgaactcagcagccgtctgcggcataacctgtccgcatccggtgtgcgggtgctgaccggtacacagttacagtcactgaagaaaacagaaaatgatatagaggcgttgtttgatcatgattgtgtgacccgcgcggatgtggtgattgccgccaccggactgaaaccggatacctcgctggctgagctggccggtctgactgtccggcgcggtattgtgacaaacagttcattacagacatccgatccggatatttatgccctcggcgattgcgcggaaattgacggtaaagtgatgcagtatctgcagccgattatgctcagcgcggtctgtctggcaaaaaatctgaccggcggagagggaaaactgacactgccgccaatgcttatcagggtgaaaacaccggatctgccggtacagctcgccggggattttcatcatcctgatctgcggtggagtattgatatcagccgcaacggtatgacggccaaaggccatgacagcgccggaaatctgcacgcttttgcggtaacggaagacaaactcagtgatgcttttacgctgctgcgtcagctgccgcagcactgatttatcatggtttatgactgaattttgaggtaataaaaatgacattacgtgaaaaaaccctgggcgaactggcgctgtctgtgaatggtgcatcggcacttttccgccgttatgatctggatttctgctgcggcggaaaacggacactggcaaaagcggcagagaaaaaatccctgaatatcgatgaaattgaacaggcattactcgccctgaaagatgaggcaccggcgcaggactggcggaaagccccgctgagcgacattatcgcctttattattacccgttatcacgatcgccaccgcgcacaattaccggaactgattttacaggcggaaaaagtggagcgggtgcatgccgccaaagccagtgtcccgaaagggctgacccggcaactgacggcactgcatgaagagctgacctcgcatatgatgaaagaggaacaagtgctgtttccgatgatctgcaacggcatgggaccgcaggcggcagggccggtacaggttatggaagcagagcatgatgatgcgggggatattgtggaggtgattaaatttatcaccaataatgtcacagcaccggaagaagcctgcacaacctggcgggtactgtataacggtatcaataccttcattgatgatttaatggaacacatcagcctggagaataacttactgttcccgcgcgctctggccggggaatagttcagctgctgatatcatgacggaacagcgggatatattgcccgccttgctgttccgtcagctgtttttcttcctcactccagccgtagttaatagcatggctgaccgctccggagtcgcgggtggtgataatcagtgaggctgccggtgctgcagtgtatgcagagagtacccggataagtatattcagttcatcacgggtaaaagtaacctgtgatgcaggtacggtggtttgcaaacgctgcagtaacattgtcagagaatgattcattcgtgcagtgcccctttaccggtatcattaatattttttaacttatatgcgacgttatcatatgacagataagagtgataccggctgaatctgagagtggtcacgatgagatcgggaataagattcttctttatcataaataagaaaatcaaacacccgtgggtatttgatttaaatgagatatattgcttattattttttataatacgggatgaatgttatttttaataaatccgttatttgacttctatatttgctgtgtagtatatctttgccgaatcagcgatagcttatggtgacaatatgtttttctgaatcagataaaaccggagtgatatttacttcaccaatgttatccggtattaatgtaccgttaggtttattatccgcctgaatactgctgttatatttggcggtttcaccggaacggtaacattcggcattgacgttattgccggatacctgataggtgcagggggcttctgtcagtgacccgtagaaattgatgacgccgccttgctgaccctgcaatgatgcgctgtgtgtaacaaaagataatgcaatacctgcaactaaaactaaacggtttaacatagacatatttttactctctgtattcgatattaactgaaagtgtcccgttttaatattatgagaaaagtatcagttaataacatcacaaatgatagttaacggttaatgataatatatgatcgctacgtcttactttatagtttgaatgttacatcagtattattaaacagacccataacaaatagcctgtcgcaacaaaaacaagggctgttatttctgttctttttatttaggatttgtttattaagtgtagtttataatgcggacattaaaacaaaaacactttactcagtatctatatcctgtccgccccgttacggggctttttttatccgaaatacattcctgtttaaatttgatcaatataaacgggaatgtcagttgctgtgattattgaggaaaactcatcaaaaaacggagcgaatattagcatcaaaaatcgggatgggcaaaattaagaataaactgaatgacatcacctaagtttatgtttattggtttttttatgaccagaatcccgggaaacaaaataaaatccccgggattaaattgtaatgttccgtgtaatagctaccaattctgtaacacaatgttacaagatgtttcgccattatagagcttagtgatgttttccagcgtggtttcgctgatactcaacagagcttcttctgtcagaaacgcctgatggccggtaaacaggacgttatggcaggaagagagacggcggaacacatcatcctgaatcacatcattcgatttatcttcaaagaataaatcacgttcattttcatacacatccatacccagcgcgccaattttctgctgtttgagggcattaatggcggcagcggaatcaattaatgcaccgcggctggtattgataatcatcacgccgtctttcattttggcaaatgcggtttcattcagcagatgatgattttccggcgtcagcgggcagtgaagtgaaatcacatcagattgcgcaaacagcgtgttcagatcgacatattctgcacccagatccagtgctgtctggttaggataaggatcagacaccagcaggcgcatcccgaatccctttaatatccgcagtacggccaggccgattttgcctgttccgacaatcccggctgtgcggttatgcatattaaagccggtcagaccctcgagagaaaagttagcatcgcgggtgcgctggtaagcacggtgaatacggcggttcaggctcagcatcatgccgacggcatgctcagccacagcttccggggaataggccggaacacggacaacctgtatacccagctcttcagcagcggctaaatccacattgttaaaacctgcgcaacgcagtgcgaggattctgatattgagatctgccagttcctgcaatacttcccggttcgcatcatcattaacaaaaatacagacagcatcggcacctacggcgttttttgcggtttgttgtgtcagcgggaaatcaaaatattcgatatcatactgaaagcgcggatcctgattaatcaaatccatatgtttgctgtcgtaatgtttggtactgtaactgacgattttcatcggggttcctccgctaaaaaataaatcgctacactaaaccggatagccctgacaaaatagggctgtcctgtgttcagaaatgattgaaatctgctgactacagtataacgcttagttgatgtatctgtaaccggggaactgcacctctgaggtctatgaaaaaattactgaaagtgctggtggtactgcttgctctgctgatgattatcctcccggcggcctggctgacaattccgcgctggctgcctgccgtggtgaaatcctctctgccggatggcgttacactgtcactttctcagccaaaaattcgtgcgggtggcctctatatagaagaagcggctctccgcagtaatgaatgtcagctggcgggcggggaaaagctgtcacttcactatcagcgcggcggccgctggattattgatgccggttcactgaccggtgatgcgggttgctttcagaaattaccttccggccctgaagaaacagacactacaccggttgatatcggtgcgctgttatcgcagttgccgccggtgacgctgaccgctgataacgttatccccgcgccctggcagatgtaccggggaaaactgagcctgacaaccgcacccggccggggacagcaattgagttatcagggtgagaacattcaggcggagctggcggttgatccggcgctgaacctgactctgtcacaactggatgccactgttggtgatgaaaaatttgcgctcagcggcgcactgacactgccgctgaatacagcggagctgccggataaaggcagattacaggctgaaatcacaaccacataccggccacagccgctgatggctgcctttgactggcaggggcggcagggtgttctgacgctgagtgaaactgatccgcagaccgtgctgctgaatattccctgggaagccacggcggaaagtattctgattaaaaacggggaatggcgctgggatgagtgggaacagcccctgcggggaactatcagcgcagaactgaaaaactggctctcctcaccggcggatatgcttttgggggcgcggctctccgtgaccacgcagggtgtgcgcggtaaaggcacggtggtattgcagttaccggaaacaccgcttccgctgactgagtttgatattccttttgagctggccgggcaggttaatcacaatgatatgtgggcagcaggacgggtaccggcggtactgaccggcacattttccgatccggtgatccggttacgctccggggcactggtgcgggcacgcgggcagctcagtccggattttctggtggaagaactgcgtctgccgctggcgggaacctcgttgtcacagcagggaatttccgggccgctggatgctattgtgacggtgaataatccggagctggggcgttaccgttttcagatgaaaggccaggcgcgggaattcctgccggataatggccgctggtactggcaaatctggggaaaaggccggatgaaaccgctgaatgcggactggacattctccggtgccggttcctggctggatgaggaaatccgtatccgtaaactgaacaccggattcaacggtatccgctacggtatgatgtcgatggatgccccggcgctgacactgttatccccgctgatctggacgcgggttgacgggcaggagaaactgtccgggaaagtgcagctgaccacccggaaaatccggctggataacagctatctgccgtccgcgacctttgatatgacgctggatggccgtgacccccgcgatttttctgttaaaggcacactgtcagccggaaaaaatatcgggccgatacattactggagccgctgggacggtgtccgtctgcgtggtgaggcccgctggccggagcaggatatgcgggcatttcagacgctgatcccggccgacctggggatcacactgcgtaacggcgttttctatgcccaggcggcgtattccgctgcaccgggtcagggatttgtcgccggtggtcactgggtggtcaaacaggcgggcatgtggctgaaagacggcgaagtgagcggtgtggattttgtgctgccgtggcggctcgcggacagccgctggcagctcggcagtaaaacgcctgtgatgctgcggattgcgcgcgttgagaatctgtttgaagtgacggatattaaagccgatttgcagggctattacccgtacgatgagacgtatccgctggaactgtccggcgtcagtctggatattctgggcggacaggtcaccatgccgtcactgaccattccgcagaaaaccgcagcggtgataaaactggataaactgaataccggtccgctgatcaatacgctgaaagtgacacagtttgcccttgaaggcagtatcagcggggaattaccgttttatattgataatccgcagtggattgtgcataacggttgggtggaaaacgacgaaccgctgaccctcaatctggataatcagtttgttgaatcggtcagtgaaaacaatatttcagcgggtacggcgattaactggctggattatctggtgatgaaacgggtgcggacggatgttaatctgaccaacctgggtgtcctgacgatgtcatcagtggtttccggctataatccggtactggatgcacggcgggcggtaaatctgaattaccggcatgaggaaaatgtgtttcagttatggcgcagtctgcgtttcggcagcaatctggaagcctggctggaaaagagtatttcacagaatcaggagtaacatccgacggagtcagaatgaaaaaatggatagcaggtgcggtattaccgctgatgattatcgcgcttaacggttgtctgcgggtggaagtggccacaccggataaacccattgatatcaatatgaatgtcaaaattgaacatgaaattaatgtcaaaattgaccgccaggttgaagatttgctgaaaaataactcagcgatattttgaggtgaataatgcgtaaattcattaacagcgggctggccgcgctgacattactgatcagcagctctgcgtttgcactgaccctggatgaggccaaacagcagggactggtgggcgaaaccttcagcggttatatcgcggccgtggataaagcatcgtcacggcaggatgtcagcggtctggtgaaagagattaatacagcccggacgcaaaaatacagcgaactggcacaaaccaaccggatgaaagcggatgaagtggctaaaatcgccggacagaaactggtgacccgcgcgccgcagggcgaatatgtgctcggtatcaacggtaaatggctgaagaaagagtaacggattaacggatgcaaaaaaaagcgccggatgacccggcgcggaacaaggatgattaatgatgatactgcttgtttttgtgttgttatccggttatgcggaaagcgcttcaacgcactgacgggcattctgctgtgctttttcagcaaaatcctcacccatcgagacaccttcggcataaataaactcaatatcgctgatcccgataaaacccaggaactgtgtcataaacggcacaatcaggtcagacgtctgatcgcggtggaaaccgccgcgtgcagtcagaacaatcgcacgtttgcccgtcaccagcccttcggcacctttttcggtatagcggaaggtcttgccggcagctgcaatgaaatccagataggttttcagctgtgtcggtatggtgaagttatacattggtgcggtgaatacgataacgtcgtgtgcaaaaagctcatcaatcagttcagtctgtaatgcatttgcggactcctgacgctgtgttaaggtgccgcctgcggaaccatgcataccggaaacaatttcgttatccagaaccggtaccgggtcagcactcaggtcgcggacagtgatcgcatcatctgcatgatttttccgccattgtccgataaaataatccgccattttgttggtgtgtgagtagtccgcaagaatactggatttcagaacgagaactttttgcatagtaaaccttgttattgtgattcagcttatttattacgtaatcagtgtatgaaagccgctgtataaagaacagcagataaattcggcgcataacatcaaaaaatctgacaatggccggatacggcaaatttaataaagacacgcggtgtgcgttactccgaaaacgggataacaatgacagaggggagacccgccgcacaaaaagccaaaccgtacagacggcacgatattacctatcagaaggacagcaaggtgaattcccttcttaatgaattaaaacagttaatcccccatctatcgctgcgggagcagcatcagttccgcaaacggctggcgggggtggcgaagatccgcaaccccgaatctcagcagaaggtgctggcagggttacaggatgagatgctgcgcggtattacccgcacagagctgcgcattgccaaccggccggagattacctatccggataatctgccggtctcgcagaagcgcgaagcgatttataacgcgatccgtgataatcaggtggtgatcatcgcgggtgaaaccggatccggtaaaaccacgcagatcccgaaaatctgtctggaactgggacgcggtatcaccgggtttatcggtcatacccagccgcgtcgtctggctgcacggaccgtagcttcccgtattgcggaggaactgaaagtcccgcttggcggcgccgtcggttataaagtccgcttcagtgatcaggtcagtgataattcgctggttaagctgatgacggacgggatcctgctggcagaattacagcaggacaagctgctgctgcagtatgacaccatcatcatcgatgaagcccacgaacgcagcctgaatattgattttatcctcggctatctgcgtcagcttctgccgaaacgtccggatctgaaagtgatcatcacctccgcgaccattgatccggagcggttttcccgtcatttcggtaatgcaccgattattgaagtctccgggcgtacttatccggtggaagtccgttatcgtccggtgatgggggaagagaatgattcggatcgtgacctgactcagggcattctggatgccgtgcatgaactgggacgggaaagtgcgggggatatccttatctttatgagcggggagcgggagatccgtgaaaccgccgatgccctgaataaagcagatttacgccataccgaagtgctgccgctgtttgcccgtctttccaacagtgaacagaaccggatttttcagccgcacaccgggcgccgtatcgtactggccaccaacgtggcggaaacttcgctgaccgttcccggcatcaaatatgtgattgataccgggtttgcccgtgtcagccgctacagttaccggacaaaagttcagcgtctgccgatagaaccaatttcgcaggcctcggcaaaccagcgcaaagggcgttgcggccgtgtttctgacgggatctgcatccgactctattcggaggatgatttcctgtcacggccggaatttaccgacccggaaattctgcgtaccaacctggcctccgttattctgcagatgaccgcgatcgggctgggggatatcgccgccttcccgtttgtggaagcgccggataaacgcaatatccaggatggcgtcaaactgctggaagaactgggtgctatcgacggtaaaacctccgccgaagggcattatcatctgacacaaaccggccgtcagctggcgaaactgccgattgacccgcgcctggcgcggatggtgctggaagcccgtaaccacggcgcggtgcgggaaaccatggtgatcgccgccgcactctccatccaggatccccgtgagcgtccgctggagaaacagcaggcgtccgatgaaaaacaccgccgctttgcggataaagaatctgactttattgcctttgtgaatctgtggaactacctgaaagaacagcagaaagtgttatccaactcgcagttgcgcaaacagtgtcgtcaggagtttcttaactatctgcggatccgcgaatggcaggatgtgtatacccagctgcgccaggtggtgaaagagcagggaattccggtgaacagcgaaccggcggattataaaagtgtccatctgtcgctcctgagcggtctgctgtcccatgtcgggcagaaagacacggaaaaacaggagttcaccggggcgcgtaatgcgcgtttctccgtcttcccgggttccggcttatttaagaagccgccgaaatgggtaatggtggcggagctggtggaaaccagccggttatgggggcggattgccgctaaaattgaaccggaatggatagagccgctggcaccgcatctggtgaaatatcactacagcgagccgcactgggagaaatctcagggtgcggtgatggcaatggaaaaagtgactctctatggcctgccggtcgtggcgggacgtccggtgaactacggtaatatcgatccggcgctgtgtcgtgaactctttatccgtcatgcgctggtggaaggtgactggctgacccgtcatgcgttcttccgggaaaaccagaaactgcgtaatgaagtggaagagctggaacacaaatcccggcgccgcgatatccttgtggatgatgaaactctgttcagtttctacgatacccgtctgccgccggatattatctcgtcacgccactttgataactggtggaaacgggaacggctacagaaaccggattttctcaattatgagaaaaacatgctgatccgctctgatgctaatcaggtaactgcacaggattatccgaactactggtatcagggggatctgaaattccgcctgagctatcagtttgaacccggaaccgaagcggacggtgtgaccgtacatattccgctgccggtactgaatcaggtcagtccggaagggtttgactggcaaatccccgggctgcgtgaagagctggttattgcgctgattaaatcgctgccgaaaccggtacgccgcaattttgtgcctgcaccaaactatgcgggcgcatttatggagcgggtacctgagccgcagggcgcactgctggatgcgctggagcgggaactgcgccgtatgaccggtgtcacggttgatcgcgaatcctggcagttggatcaaattccgtcacatctgaaaatcaccttccgtatcacgggggataaacagaaaaaactggcggaaggttacgatctggaagctttaaaactgagcctgaaagagcaggtgcagcagacactgtctgatgtggtcgatgacggtatcgaacaaagcggtgcgcatatctggcgtttcggcgatattcccggctgttatgagcaaaaacgcggtggttatgcggtgaaagcttacccggcgctggtggatgaaaagcagagtgtcgggattaaggtctttgaaacggaatttgagcagcagctggcgatgcaggcgggaacgcggcgcttactgctgctgaatattccgtcgccgatcaaatatctgcatgaaaaattaccgaacaaagccaaactggggctgtattttaacccgtacggtaaagtgctggatctgattgatgactgtatcgcctgtggcgttgacaagctgatcgcacaatacggcggcgtggtctggcaggaagataaattcgcgcagttacaggggtttgtccgggctgagctgaacgaaaccgttgtcggtatcgcgaagctggtggagcagatcctgaccaccacatttgccatcagtaaacgcctgaaagggcggattgatatgcagatggcgtttgcgctctctgacatcaaagcacaaatgagcggactggtcttcccgggctttgtaacggctcacggctggcagcgtctgccggatatcctgcgctatttacaggggatagagcggcgcatcgaaaaactggtatctgacgttaaccgcgacagggcgaatatgagtaaaattgagcatgttcagaacctgtggaagcagtggcagggtaagttatcaccggtggagaaacgcagaccggaagcggaggctgtgcgctggatgatagaagagttgcgtatcagtctgttcgcccagcaactgggaacgccgtatccggtttctgataaacggattattcaggcaatggaacaaatcagcgggtaaagtgccgtttttgcggaacgctgtttatttatccagtgttggtgattgtagtaacaaacgggcatatcatcgcccgttttcttttatcctttttctgttttttactattttagttacaacatacaatgtgttttcatctcaatcctccgcaggaagcaacagtgcttgtttatgttcggcagagaaaattggcgggatgcgggggaggagacaaaaaagccggtcagtgaccggctcctgttttcagattttcagcgcaccagataccagagtgcgggaactgccgctatcagcagggctgcaataatgctccactcgataaaatgcagtgtggtttttatctcacggtttttcagggcatagagaaataccagaatacccggtgcatagagcacaactgacagcatcagattaataatgccggatgcataaatcagccataagccatacattgccgcaatcatacccacgccgagcagtgccggttttttcattctcagggcggtttttaccaggaatgcaccgaccaggaaatagggcaccagaatcatttcagaagcaatggtcagcagcgtattgtaattactgccgctgagccagatcagcaccagtgccagctgtaccgcaccgttagtcatccataaagaggaggatggggcattattcgcattctgttttttaaacggtgacgggaaagagccatgcagtgcggcgataaacggcacttcggcagccataattgtccagctcagatatgcaccacagacagaaataatcagacccgctgcgataataatctcaccgctgccgccaatcaggttcaccatcagtgtcgccattgacgggttgcgcatttctgccagttccggacgggcaacaacccccattgacagcagggtaaccaggatataaatcgtcagtgcggaaatcactgccatcattgtggccaggccgacatctttgcggcggcgggcacgggcagaaaccacaacagcaccttcaatcccgataaacacccacagggtgatcagcatggtatctttcacctgctgccacacaggtactccgagatccacaccggtgaaatcaagatggaaggtatcccagcggaaagcgatcacagccagtacgataaacaggccgagcggcaccagtttagcgaacgttgccagtttattgataccggcggcagtctgtacgccgcgcagcaccaggcaatgcacaaaccacagcagaacagattcaccaatcagcgcctgccaggtatttccgtcgccgaaaacaatattgtccggggtatccgtaaaaaagctgaacgccgcaaacacaatcaccagataggagacgttggcgatcactgcacataaccagtatccccaggcggagcagaaaccaatcagttccccgaaaccgtctttggcataggtaaagatgccgccgtcgagatccggacgcagccgggaaagcagcagcagggcgaaagccagaaagaggataccgacaccggtaattgaccagccgataataagtgcagccggactggccacttcggccatattctgcggaagactaaacacaccggcaccaaccatagaactgagcactaatgcggtgagcgcggttaaactgagtttcttatccaaaagaccttcccggtaaatctgatgcggtaagcagggtattcatgcagtcaatctgactgaatacgcaaaaattggcgctgattgtacggatacacggcgggatatgcaatgtttaatcatgcattaattgcattatattatgcatatttactgtttatcagaacgacagcagaagaatgtagtgaaagtgttaataccccggacaaaagccataaaaaaagcgtatcagagatacgctttttccggtgaactgtcaggcggtgattatttaaataaatcagcgctgatagtcacgttaccgccgctggactgccactgacgggtgatatgataatatttcgcccctttggctgccgcacgtttggcgacctgataagagacttccggtgacgtggtgtagtaaccggtaaaggttacgctgtcaaacggtgccataacagcggctgacgccttgttcagttcctgaacctgggtgccgtccggcagagtcacggtataacggccgctgcgggaggactgggtttcaaagaaacgaccgacattgttaccggcggtgtcagtagaggaggccacaccagggatttcgacctgtttggcagcttcgccaccggcagccagtgcggcacgaccggcatcagaatccgcagggatcagcgcttcttctgtctgcagtacacgttttggtgcatccgctttatagacatatgcagtgaccagctggttaccgccatcgttggtgaaaatattacggacgataaagaaagaggccgcatcttttttcactgcttctttggcgatagcatcgttcagatcagggctgttggcaaaaaagccgctgacagtgacggtatcaaacggctgaaggccgatagcatctttctcaggtaattcattaacgccacggaactggcggtagcctttttcctcggccggtggtgcatcgcggtggtaaacatccgcaacaacacgcatattgccgttgttgttcagatcatcgaggctctggatatagaaagcatcggcacccattttgtctgctttacgcgaaacggcagctgcggcttcataaatagcattaaaacgccctgtaactgcaatccgctcgaaaggctggtactgagcggcctgttccggtgttaattcctgtgccgcctgagcggggagcagactggtaaatgaaaaaaacatcgcagatgcgatgaccgttgttttcagcttcatacaaaatccttccgccttgcgcaattaatattcataacgtgctgaacctgtaaattttatatcctggccgcacaattatgacatgtatttgtgcttgttgtcgctttaatttatcgtgcaatctaacgactgttaatcatacagctatttttaccataaatttatgcaatcatagtcatttatcggcaaaaaaaatttccgcccggataaataccgttttaatttcattcagcaaacaaattagatggatcgatatcacatttttcagtagcttattaggacatatcggataaaagggtgcttttgatctgaatttgtgcagttggttgtttttttacgcacatgtccgaccaatcatccgtaaaacacttgagcttatataagggaacattatgcgtattggtgtaccaaaagagcgacagtccagtgaaacccgggtcgccgccacgccggcaacagtaatacaactgaaaaaactcggatttgatgtggctgttgaaacaggagccggtcatcttgccagttttgatgacaacgcttaccgcgaagccggtgctgatattgtcagcacacaggaagcctggcagtctgaccttatttttaaagtgaatgctcctcaggatgatgaaattccgctgatgaaggcgggcagctcactggtcagctttatctggcctgcccagaacccgcagctgctggaaaaactgtcagcacagggtgttaacgtcttcgcgatggattctgtaccgcgtatctcacgcgcccagtcgctggatgcactgagttcgatggccaatatcgccggttaccgtgcgattgtggaagccgccaacgccttcggccgtttcttcaccgggcagatcactgctgccggtaaagtaccgcctgccaaagtgctggttatcggtgccggtgttgccggtctggccgctatcggtgcggcaggcagcctcggggccattgtccgtgcctttgatacccgtcctgaggtaaaagatcaggttaaaagtatgggtgccgaattcctcgaacttgatttcgaagaaactgcgggcagcggtgacggttacgcgaaagtcatgtcggaagcttttattaaagctgagatggcgctgttcgcggatcaggcgaaagaagtggatattattgtcaccaccgcactgattccgggtaaaccggcaccgaaactcatcaccagagaaatggttgagtcgatgaaatcaggcagcgtgattgttgacctggcggctcagaacggcggtaactgtgaactgaccgttccgggggaaatccacaccacggaaaacggcgtgaaaatcatcggttataccgacctggcggcgcgccttgccacacagtcatcccagctttacggcaccaacctggtgaacctgatgaagctgatgtgcaaagagaaagacgggcagatcaacattgattttgatgatgtggtgatccgcggtctgacggtagtgaaagccggtgaaatcacctggcctgcgccgccgattcaggtatccgcacaaccgcaggcaaaaccggccgctgtgaaagcagagaaaaaaccggaaaaaccgatgtcaccgtggctgaaatacggcctgatggcactggcatttatcctgttctcctggctggccaacgtggctccgccggagtttttatcccactttaccgtgttcgcactctcctgtgtggtcggctattacgtggtctggaatgtcagtcatgcgctgcataccccgctgatggcggtgaccaacgcaatttcggggattatcgttgtcggcgcactgctgcaaatcggcagcggcggctgggtgacattcttctccttcattgcggtactgattgccagtatcaatattttcggcggattcaccgtcacacagcgtatgcttaaaatgtttcgtaaggggtaatgaatatgtcgggcggagtcgttacagcggcatatattgttgccgcaatcttatttattttcagtctggccgggttatcccgccatgaaacctcacaacggggtaacctgctgggtattaccggtatggctatcgcgctggttgccaccatcttcgggccgtattctgccaatatcggctggattattgttgccatggtgattggtgcggtaatcggtattcgtctggcacgtaaagtcgaaatgaccgaaatgccggagctggttgctgttctgcacagctttgtgggtctggcggcagtcctggtcggtttcaacagctatatggatcacaaccaggcgctgacctcggcggtgatgaacaatattcacctgacagaagtgttcctcggcatctttatcggtgcggtgaccttcaccggttctattgttgcttacggcaaattatgcggaaaattatcctccaaaccgctgatgctgcctaaccgccataagctgaacctggcggcactggtggtgtccttcctgctgttatggacctttgtcaaaaccgacagcaccggcttacaggtcttcaccctgatcctgatgaccgtgattgcactggctttcggctggcatctcgtcgcctctatcggcggtgcggatatgccggtagtggtttccatgctgaactcctattccggatgggcagcggcggcggcgggctttatgctcagcaacgacctgctgattgtcaccggtgcgctggtcggttcttccggtgcgatcctgtcttacattatgtgtaaggcgatgaaccgctcctttatcagtgtgattgccggtggtttcggtactgacggtacggcatcatccggtgatgaagagcagggcgaacaccgtgaaatcagtgcggaagatgtggcggaaatgctcaaaggggcaagttccgttatcatcaccccgggctacggtatggcggttgcccaggctcagtatccggttcacgatatcactcagaaactgcgtgataagggcatcgaagtccgttttggtatccatcctgttgccggtcgtctgccggggcacatgaacgtcctgctggctgaagcaaaagtgccttacgatatcgtgctggaaatggatgaaatcaatgatgatttcaaagacaccgacgtggttctggtgatcggcgcgaacgacaccgttaaccctgcggcactggaagatccgaacagcccgattgccgggatgccggttctggaagtgtggaaagcgcagaacgtgattgtcttcaaacgttcgatgaataccggttatgccggggttcagaacccgctgttcttcaaagaaaacacccagatgctgtttggcgatgccaaagccagctgtgacgctattctgcgcgcactgtaatccgggtaaaaaagcataaaatgcacaaggcgggtaaatgcgttacccgcctttttttcactcagagggctcagattaatgaaaaaaatgatggccgtttcactctttctcttttctgcctccgcattagccattccgaatatctggacatccggtttcggccaggggtttatcgagtacgggatcagtaatgacaccggcgtgaccgttgtcgttgcctgtaacgtcggggcggacccggaggattatgaaaattcaatcgatcacagtattgatatttcggccggtgatcatgaagtggaagggcagattgaatttctgattgacgacgaagcatattttgtaccggacagcaccaaacaccgtgccggtgctgcggcctggaccaatctgactgaagcgctcagtaaagctgcggaatttaaggtttattccgataataaattagtcggtgaatttaaaccgaataagaagaacgtgaagaaagtgctcggtgacgggatgtgtgcgccattgttctgattatcgcagaacgcgcagaaaattcccgcagaagccgtggcctctgcgggagacaggattaatcatcatcactggtatcgatcggacaaacaaagccgtccggtttcaccgccagcaaatcacacttcagatggtcgataacatgctctgcggtattgccgaggaacgcggcagaaataccggtccggccgataatacccagcaccaccaccccggcattcagttcaccgcacacttccgggatcactttctccggtaatccctcataaacgtgggtgtactcttcgccgatggagaattgctggcgcagttctttcatggcgatgagatgctggccgcgcagcgcgttattgtaagtattcgggtcaaaatccggtaattcgatagcgatattgataggcgccaccggataagcactgaccagatggattgccgggtctttcacaatccgttttgcgagatcctgtgtcagcgacaccagtttgagattcagcgcatcatggtaggattcttcattggacaggttcacaccgaccaccacagaaccctgttccggccagactttatccttaaccatccagaccggacacggacatttgcgcagaagctgccagtccagcggggtgaaaatcagagactcaaacttatcattctgatgcgccattttcagcagcaggtcatgaccaccactgacaacttccctgataatcgcctcataaggccggttatgccataccactttcacttcgatatcgatgccggcttccagataataacgcgcctgctgtttgatccacgcgcaacgctgggcaattacgcctttgcgcatagcatcccgttcttcaggggacaacagggtggtcatatcgtatgacagatcatagataggtaagaaagctttgatgcgtccgccattgcgttgcacgatatataccgcacgccgtaatgccggctgatcatcctgattggggtctattgcaactaagaggttctgatattcagacattcatctctcctcgcggggctggatacgtatctataaagataaaccaaacgggagcaggaatgtaggaaatattcgcaccagaccgaaataaaccggtctgatgcgttttacggcagccaaaaatgttgccggggaaggaattactaatcctgtggcagtgcaggtactttaccggccagggccgccagctgttccatatcttcgatggtgatatatttgccttttactgccagcattccgctcttctggaaacgacccagcagacggctgatggtttcgaccgtcaggcccagatagttaccgatgtcgccacgggtcatggtcaggcggaattcgcgaggggagaaaccgcgctgcgcaaaacggcgggacaggttataaataaaagcagccagacgctcttccgcattctttttggagagcagcaggatcatttcctgatcacctttgatttcgccgctcatcaggcgcatcatctgctggcgcaggttaggcattttaccggacaggtcatccagggtctcatacggaatctcacagaccatggacgtttccagcgcctgggcgaaactcggatgctcggtattgataatggcatcaaagccgacgaggtcaccggcaagatggaaaccggtgatctgctcatcaccttcttcggtgatggtgtagctcttgatggtcccggagcggattgcatacagtgatttcagctcatctccggctttaaacagtgcctggcctttctggataggctttttgcgctcgatgatattatcgagctgatccagctcatgctcattgagcgtgaacgggatgcaaagctggctgatgctgcaatcctggcagtggatcgcgcagccacctgattgaattctacgtactacacgtttttccgggatcataggcttgctcttgaaataatattgatttgaatcaattttatcacagactaccaaaagtggtaagtggtctgagtttaaatatcgtcataccgggctgaaaacaggggcataatattgacatattatgcttttttcgtgatgtcataatgtgaattatttgattaaactctcaataatccggtttaaaataacagagggagggaatgcaggtcaatttcctgctcatcagtatgttaataaatggattaaatatgaataacgcgttcttttcacgttataaagtggtgtgatacattaaaaaaaatcacaaataaataacgaaaagaaacacggtccggcacagataaaaaatataaaaaagcagcagccggacataatacaccgtcataaacctgcagtgctatctttgatatgctgcattatgctgaaaccgtaatttgcctgattcgtcataaaacgacaggtattacaaaaccgggactgtttaagttaaggaaaagtaatgatgtcatatgcattacctgaatcgatgatggcaattgatattacccggcacggtggcccggaagtattacaggcgattgagatgccgttgccgaaggtacagggagaatacctgctggttaaagtcgccgcagccggtgtcaaccggcctgacgtcttccagcgtcagggcagttacccgccgccgccggatgcttccccgattccgggactggaaatcgcgggtgacgttgtggctgtcggggaagactgcaaacgccgccaggtcggcgataaggtgtgtgcgctggttgcgggcgggggatatgcggaatattgcctggttcatgacagtatcgcgctgccgctggaaaacctgagttacacggaagcggcagccattccggaaaactttttcaccgtgtgggcgaacgtctttcagaccggcaaactgcagagtgaagagagtgtgcttatccacggcggcacctccggtatcggcagtgtggcgatcatgctggcgaaagcttttggtgccacggtatacaccaccgtcggcagcagtgaaaaagcagagcttgcccggcaactgggcgccgatcacgtcattaattaccgtgaagaggattttgcacaggtcattccggaactgaccggcggtcagggtgtaaatatggttgttgaccttatcggtggtgattatgtcagcaaaaactatgaggttgcggctaaaggcgggcggattatccagattggcctgatgcgaggtaatccgcagaacctgaatctgatgccgctgatggtaaaacgcctgctgcataccggttcgacactgcgggcgcggacgccggaagagaaggcggtgattgcccgggatcttgcgcataaagtctggccgctgctgcggtcaggaaaggtcaagccactggtcaactatacctttaacctggcggatgcggcacaggcccaccagctgatggagtccggcgatttaaccggaaaaattgttctgattaatcctgacttctgattttcttcctttatacctgcactgtcagggtgtttcgcaccatttgctgattgtgcaggtcacttcctgctatactgtgatagtgataatcattcccgttaaaagacaaaaagtgctattttagatatatctaatttgatctttctattccgggagactatagtagttcctgaaggcaaaacagatatatctaaattctgattttgctgattatcactatttatcacaaaaggaatttattatgtttcttcatgcgttacgccaccgcgcctgtgattcacaggaagggcgtcagcgccgcgggggtcatggcggccgtcacggggaacgccacggacaagacgggcatcgttgccacggcgaacatcacggtcacgacgaacaccgcagccattgctgccatggtgatcatcacggacatgacggacaacacgaacatggttgccacggtgatcatcatgagcaccacgaaggccacggtcgtcaccgcggtcgcggaaaagggcttcgccgtctgcttgatcatggtgacctgcgtattatgatgctggctaatcttaaccagaaaccgagtcacggttatgagttaatcaaatctatcggtcagctgacttccggcctctatacaccgagtccgggcgtgatttacccgacactgaccctgctcgaagatcagcagctgattgtcgcggaaaacaccggtaacggccgtaaaagctacagcctgacaccggaaggtaaaatgcatctggaagagaacaccgatgttctggaacagattgcacagcgcctgcaggagaccaaatctttccgccgtggttctctgttatcagatgaaatcgagcaggctctggggaatttacgggcactgctgcgccataaactggtcaccagtgaactggatgaaaccaagctcgggcagattgccgatattcttaatgatgcagtacggaaaatagaagcggttaacgacgctctgagtaaagaaggggaataatatggcggaaaacaccacctccggaaaaatcccgccggaaaagccggttcaggatgaaaaacaggaagcggtgaacaccggcaggcccgcagataagtcgtgtcccagcttaccgttttcctatttacgccgcgccttgcgcaataaggtcggcaaacacgaataaccggggcgcagcgaatgcgcccgggtcgtgcaaaaaaatcagcgtgatttcagcgcattaattaatttatccatgcctgcggcgagtttatcacgcgggcatccggcattgagacgcaaaaatccgcgtccttcctctccgtaggtatatcccggcatgatcgccactttttcctgtgtaatcagtgcatgttgcagggcattatcatcaacattcagcgggttcagatctatccacgccagataggtggattccggcacctgccagttcagctgcggaaattcagcatccagccgctgctttatataatccagattagcaaagagataatcacgcagctcatccagccacggcgcaccttcccggtaggcggcgatatgagcgataaccgccagcacggcaggagaagagagcccgtcacaggctttcagctgatgaaaataggcttcgcgggaggcggtatctgaaatcagcccgtaagcgccggtcagtgccgggatattgaaggatttggatgctgaggtgaataatgcccactctccgcgcccggtttcagaccacggcgtgtgctgatgcggcgcccggcacagatccatatgaatttcatcactgatcacccgcacattatgccgttcacacaattctgccatggtggtcagttcttcgcgggtccagactttcccggtcgggttatgcgggctgcacagcagcagaatccgcgtctctggttttgcaaacagggatcccagtgcatccatatcgcaccaccagccctcaggagttttttgcagcgggcagggaacaatagtgcgctgattaccggtgatcgtcttataaaatgcatcatacgccggggtatgcaccaccacaccgtcaccgggctgtgaccacaggcggatcatctggctgaccatgtaaatcactgatggcccgtacaccagcgcctgagtatcaatctgcgcctgaaagcgggatgaaaaccagtgtgcaacagcgctgagaaaatcgttgtgctgccagcggctgtagccgaacacgccgtgcgcggtgcgttctgaaatggctttcaggatcaccggtgcggtgacaaaatccatatctgagatagtaaaaggcagtaaatccgcctgaccaaagcgatcctgcacaaaatcccattgcgtgcagtaagtgccgtggcggtcaaccgggacagaaaagagagaggacatagtttctccgtaaagaaaaaccgcactgtcaggcagtgcggtgtcagttatcaggcgttttgcggttccggctgagcggaatcaggcgcggatttcatcagcttttccagttcatctttgacagactgaacctgcgggccgataaccacctgtaagttatgttcattcagatggacaaccccgatcgcccgcaatgctttaagctgtgcgtcatccactttgctcatgtcctgcacggacatccgcagacgggtgatacagttatccagtgaaataatgttctctttaccgcccagcgccgccagaatagccggaacatcatagccggattttcctgcggaactgccggttgccggtgcgctttctttggtgtctgtatcgcggcccggggttttgatattgaagcgggtaatggcgaaacggaaaatcgcatagtaagaagcgaaccagataaaggccaccaccggcaccatataccacttggtctggataccgtggaggatcccgaagaccacaaagtcaatcaggttaccgtcggtgttaccgatagtgacaccggtaatcgccattacggtgaagcccaggccggtcagaattgcgtggatcagatacaggaacggcgcgacaaacaggaacaggaattccagcggttcagttgtgccgccgataacacaggcaaccacaccggaaatcagtaatcccttaattttatgacgattttcaggatgagcacagtgatacatcgctaatgccgcacccggcaggccgccgaggaacgccggcattttaccctgagacaggaactgtgtggcactggccgcaaagccctgggtttccgggcaggagagctgcgcctggaaaatggtcagtgcgccgttaaccgtattgccgcatacttccatggtgccgcccgcttcagtaaagcggatcagcgccaccagtatgtgatgcagaccaaacggcagtaacagccgttcaccggagccgaaaatcatcggaccgaaagcccctgcgctctgaatcagtttgcctaatccgttgatccccatagcaaaccacggccagatcagcggaaccagcaggccgcacaggccgagtacaagagtggtgataatcggcacaaaacgcgtaccgccgaagaacgccagggcatccggcagacggatggtattgaagcgttcatgcagcatatacacaataataccgacgataaccgcaccgaggatcccgctgtcgattgactgaatccccagcacatcacggatgttgtgggctttcaggatagcagggtcggtagtcggtaaaatatcagcggcagtgaggtaaaagttagtggcgaggttaaataccgcaaagccgacaaacccggcaaatgcagccacgcctttgttttcacgcgccagccccagcggaatggcgatagcaaacatcaccggcaggaaactgaaggcaaatgagccgattttgctcatccaggtgaacagtaactggaagacggtgtgatccagaaacggcagcagtgtcagtacatcccggctgctgagggaactgccgatgccgaggatgatcccgcagaacgagagcagcgcgacaggcagcataaaggttttgccaagtccctggaaaaactcccagagcgtgactttttgttttggttggctactcatacggtatcctgtaaatgtcagtgtggtgttgtgaaggtaaaataagataaaacgttttaccaaattataatagttgcccgatcacaaaaaataaacatgacctggcaaccatatttcggaaatagataaaacgttttatcggattttgtgtaaaatcccgcgcagtatcctgagcataaggaagtatccggcgttatgaatctcagaaaagtcacgatagttgatgtggcgcagcaggcaggggtatccgtgaccacggtgtcactggtgctcagcggaaaagggcggatctcgcggaaaaccgcggataaagtcaacgcggcaattgaagaactggggtatgtccgcaatcagcaggctgccacattgcgggacaatatctccaatgtaatcggcctgattgttaaagatattaccgaaccgttttatgcggaagtcgctgccggtgtcagtgaatatgcggaaacacagggcaaacaggtttttctgactcagtgcggcaattcttctgccgggtttgcccgctctctggacagtctgatccgctacggcgtggacggtgtgattgtcggtggcggtaaatttctcaccaatgacgtggttgagcggataaatcattatcagatcccgatggtgtgcgcggcccgggccagtgagttctccggcattgatgttgtccgcccggacaatgcctctgccgccagaatggcaacggaatacctgatcaaaaacggtcaccgccagattgcctatttcggcggtgaaagtgattctctcacccgcgctgagcgggtcggcggttactgctcgacactggtgcagtacgggttgccgttccgcaccgaatggatagtggaaacggataacaaacagcagaatattatccgccgggtatctgaatttatgtatcagtaccccaaagtcagtgcgattgtctgccacaacaccggtacggcgctgggcgcgtattttgccgccctgagcaccggtaacacggtcagacagggggataacgaaagttatttcactcaggaaatcgccctggtggggtttgatgatatcggcagtgaagcactgtatgacatcccggtggcctttatcacccagccatcgcgggatgtgggccgcagtgccgcaacgcgtctgctgcggcgtattggtggtgatagctcgccgcctgcaagcgtgacactgtcacccggattttcccagctaaacggataacgacgatgcaaaaaatactctccggactgctattcctgacgctgcctgcgttttccgcaccggcggaagatttggatttgctgccggttcaggatcgcaaccaattatttgcggacgcggggaaccgtaccggtgttgcccgtaaaaccagagacgttctcgcccgtccggcggtgcccggtgaaatcgtagtgacccttatccggggtgaaggggaagaaacccgttcaaaaccggcggaagccggggattgggtggtacagaacatctgtgacgctaccggcaatgaagaaattctggtgaaaaaaacggcgtttacacgccgttacggcagtgcactgacaccgtctgacagcggcaaccggcagcgtttccggccgcagggagagccgatggattatctggtgatcacgcaggaaaaaccgtttgtgattattgcgccgtggggtgaaaaacagcgggttatgaaaggggatgtgctgctgcgctcgcgacaggatccgcaggacagttaccgtattcagaaagcggcatttgactgcacttatcaggtgattacgtctgccgggggctaacatatagccccggcaaaacgtagtgcgttttatgcgctgcggcagataaaatgtaaaaacgagatcagcgatacaaaaccggcgttgctgctcgcgtaacctgttgttcctgttatgatgcgggaatacgtttcttgccggatttccgctgatgttcgcaattctgatgacattatggccgctgtttgcgctgattttgctcggctgcattctgaagcggcggccggttttcgatgccgggttttggaacggcgcggaaaagctgaactactatatcttatttccggcgctgcttatcaacagcctcgccgttgctccgctggataacccgcaactgccgaaactggcaatcgcactggtaattatgctcgggctggccaccgcagcatttgcggtggtaaaacgtctgcgcggaataccaacggcagaattcggcgtactgctgcagggcgcgatccgctttaatacctatctcgggctatccatcgtcaatgatttttacggcccgtccggtgtggcggtggcggcggtgatcctcgcggtactggttccgctgtgtaatatcatttccgtggttgcgttatctgaatttcggcagttatcgctgcgccgcctgttgttacccattctgacaaacccgctgattatttcctgtattatcgggatgctcctgaatgtcaccggtgccggtcttccgtataacaccggtcagtttgccagattgctggccggtgccagtctgccgctggggctgctctgtgttggggcggcattgcaggtggcgactatccgctattccgcactgaaaatcagccttaacagccttgtccgcctgtgtgttatgccattgctggcgattgctgtggcgaccgtgatgggattaacccaactggaatatcagctgtttgtgatcttttttgctattccgaccgcaccgaccgcctatattttatcgcgtcagctcggcggtgacagtcagctgatggccgggattatcacgtttcagaccatggtggcagtgttgactctgccggtggttctgaccatgatcacctgaataacctgagaaaaaataatgacgtctgttatcaaacattttaccgcttccggtctggtcagtgacagccacggccgttttctgctccatcgccatccgaagctcggtatctggctgccgcccggcgggcatattgaggaaaatgaagagccgcaggatgctgtactgcgtgaaattcacgaagaaaccggactggaatgccggattatcagctgggatacacaggcgcagcaatttatcacaccactgccggaaaccggcgtgctgccattgccgatggcgatcctgaaagagtttatcccggacaagaaaaccggcgatcactggcatattgatatggtgtactggtgccgtccggtggatgaaaccgccgtaccacatccggactttcagtggatgacgccggaggagatccttaaaacagacaatgtcccgcaggatgtctgcggcctgattgctatggtgcaggcgcgccgctgaacaaagctttcacccggctgtcttttttttctgattcagggcaaatgccctggagacccccgcaacctccggttactgtggctcatcccgttataaaagccgtatgcaggagttgccatggttaccagtatttataaagatctctccttagcaccacagggtgagcaaaaaattgcctgggttcgcgcccatatgccgctgctgcgtgcactggaacagcgtttcacacaagaacagccgtttgccggaaaacgcattgcgctctctattcacctggaagccaaaactgcctatctggcacgggttctggcagctggcggtgctgaagtgtccgtcaccggcagcaacccgatgtccaccaaagacgatattgtggccgcactggttgtcagcggtattcatacgtttgccatccacggcgcggatgcggaagcttaccgcaactttgtaaaacagactctggcttgtgaaccgcacattgttattgatgacggtggtgacctggtgcatgaactgcacagtctgtatccggaatatgcaaaacacacgatcggtgcctgtgaagagaccaccaccggtgttctgcgtgcagttgcccgtgaaaaaaacaacgcactgaatttcccggtgctgtcgattaacggtgcacaatccaaacacctgtttgataaccgctacggtaccggacaatccacttttgacggcattatgcgcaccaccaatctggttattgccggaaaaaccgtggttgttgccggttacggctggtgcggcaaaggctgtgccatgcgggcgaaagggctgggcgcggaagtgattgtcacagaagtggatccgataaaagccctggaagcgaaaatggatggttttgcggtcatgaccatgtctgccgcagcaccactgggtgatatttttatcaccgccaccggctgctgtgacgtgctgacatccgggcatttcagcctgatgaaagagggtgccattatcagtaataccgggcactttgaggatgaaatcaatctgaccgatcttcagcagttaagtgacagtgtcacaattgcccgcgagaatatcgaaggttataccctgaaaaatggccgcacactctatctgctgggccgtggtgcattggttaatattgcctgtgcggacgggcatccggcagaaattatggacatgagttttgctcttcaggcactcagtgccgagtatctgctcagccatgagcttgaagcaaaagtctatgatgtcagtgatgaaatcgaccgtgaagtggcggcactgaagctacaggatatgggtgtttcacttgataatctgaccaccagacagcagcagtatctgaacggctacgagctgaagtaatctgacagacgggctgccggcaatccgcagcccgtcaaaaccggtgtttaccggttcaaacctgttgttaaccatgctaacgtttacccactgattatcccgtcctgacagatacggcacatgcaaaatacaaccccgtttcgtgaattatggctgaaattcagcgaagaagagctgctgccggaggcagacagcctgctccgtgatgcaccggatgttgtcagaaacagtgtaaccacactgcatatttataacggacagaatctgatttgccagggcgacccggctcaggcggtctacatcattctggacggcgagtttattgttaacaagcaggcggagaatggtaagcaggtcggactgacattctgctaccgtggtgaattcctcggggagatggaggcgatttgccggcaggcataccgttatgatgtgattgcgctgtcagactgccgtgtactgcggatgccggcggctacatttctgtcctggctgtcacaggatcaccgcctgtctctgctgcttaaccgccagctggcaaagcgctgtcttatcaacggtgaacagcggctgatgaatgcggttgattccatcgaaaacaatctgctctatatgctgacacaaatcagcggccatcagatccatcttccccgtgacatgctggccagcattctcggcacatcgcggcgtcatactgacaaagttctgcttcgcctgaaaacacagggaaaaattaccctcagtgaaggtgtgatcgggctggtaaaaccggactgaactgcgatccgtgccattgtgcgccggtaagtataagcatagtattactgcacactatcggaggagcatatgtaccgttttcagaatgattataatgaagttgcacatccggctgttttaaaagccattactgacacagcaggccaccgccatgacggttatggcacggatactttatgcggtgatgccgcagcgctgattaaacagcggattggtcagccgcaggctgatatccacttctttaacggcggcacgattactaacctgacggcgatttcccattttctgcgtccgcatcaggcagtgatctccgtcagcaccggccatattgccacccatgaaaccggggcaattgaagcgaccggacacaaagtcatcactgttttttccccggatggcaaactgacacccgatcatcttaaaccggtcattgccgaacataatgatgagcactgggtacagccgaagctggtctatatcactaattccaccgagatcggcacggtttaccgcaaagcagaattacaggcactgcgtcgtttctgtgatgagcacgggttatggctctatcttgacggggcccgtctcgcatccggattaatgtccgcacaaagtgatctgacaattgaggatatcgcggcactgacagatgcgttctatatcggcggtaccaaaatcggtgcgatcgcggcggaagctctggtgatcaataatccggcgctgaaagatgatttccggttcagtatcaaacagaagggcgcgcttcaggcaaaaggctggctgcttggtgcacagttcctggcgctgtttactgacgatctctatttctcattaggcaaacacctcaacagcatggccggccaactggcggcattctttacggagcagggttttaccttcttggcaccgccggaatccaaccaggtctttgttattctgccttctgcactggcagaaaagctgaaaaaacagtttgttttccatgaaacgctgctgcaggaaccgggaaaatcctgtctgcgtctgtgcacctcgtgggcaaccacacagcatgatatcgatgactttaaaaagacatttttgtcactgatctgagtgcccggataatttccgtattgataaaaccacgcggtgaaaacacagcgtggtttttttatacttcatattatggcaattatttatttcatcattattcctgcttatttccgtgatactgattcagaaaaataatactgactaaaaaaagtgttttttaatcgttatttttattctagggtttaacagcaatctgagtgcacagtacatctattcatataatctgttattaataaggaagtgaaataatgaaaaaattagacaaaagtaaattactgaaaataaaatcaccattatcaggatggtcattcagtaaataataaatacactaactaattgataaaccatgtctgtcaatccggacatggtttatccgtctgacggaagctgttatatgataaatctgacttttcctgattataaacatcagtatgcttatcagtatttttctgatgaagtctatgaatcacttaattacttattatcctattatcatttacccgaaataagctcggaagttccgttgtcatggcaaaattgcgctattcattatatcgccggtaaatatgcggaagatgatgaacatgcggaggcggtaacttacctcaatcagttgatgcgaaaaagaacaccgttatcactgactatcttgccactgacatctgctggtcattcattagcagaaaagatgatcctgaaaattatccgtgacgataaacaacttggtttcggctattgtgatgatccggtactggcagcagcggaaacggaaaaaataacacaggcattatccgttattcatcgctgcgcgccggaaaccggcaatgaaattgaccggtttatccatcagatatacctgactcaggaaaccgcagacggctcccgctttatgcgttccggtaccaatttctatatgtggggaatgatgtttgcttatgttcatccgtcacattcggtcgcgtattatattgatattctggcacatgaatgcggccatacggcactgaatattctcaatgcgggggatccgctggtacttaaccctgctgacgaggtctttgccgcgccactgcgtgatgacgaccggccgatgatcggtatttttcatgctttgtttgtattatctcggatatgttatgtattttctgaaattatccgtaacagtgacggtataccagagccggaatattatgaccggctgagcagtaatctggaaaagcttcgtaataccgccgatattgtcaggcaacatgccatactgacagaaacaggaaaaaatattttcacggctatctgtcagcgctggaacctcagctgatgcagatttaccgggtgatttttgaacggaaaagcagggcgattaatatctgctttttctttaatgcgctgggctccgggttattgatgccgctggcattactttattttgccgggaaaacactcagtgaaaaagaaattctgtatctaggcacgattaaattctggtcattttcactggcctatttttttattattccgctgataagccggtttgacagcagaaaaaccattgttttttcactattacttaaattactgtcactgtcatttttatttatcggacaaacattttacctgtgtcttgtggtgatgctggcaaacggtattgctacctccgtattttcagtagcagcaaaatactatattaaagccaccgcggaaaatatcagcgaaagtttttcagtccggatgacgctgaataatacgggtgctgctgttgcaccggtactcattacactgtgtgtctttttttcactgccttttacgtacgcattactgattctgaccggaattttcatgattggtattctcttctcagcaaaactgcgttcttgtcccagtgaagagggaaaacgtttttgttacctccatttttctgatctcaccggcagagacaccgttctgatctctgtggtcagcattatttttgccatgctgtattacagttttgaagtcattgtgccgctggaacttatccggtccggcactgagtatctgataggaccggttttgttgtttaataccctggttattatcgcagggcaaatcccggtataccgttacttcacggagaagtggggtattattaccgcgcttatggcggcaaccggtttatgcatttttttgtttattccgtggttctccggtattgcagaacttcccggtctgttactgatggtgctgggcgtcactctgctggaaatgttttacggtgcgggtatcgatacattgattacactggcggattcgccccgtaaaattgcggttctcgacggtatctcgggcatttcactggcaatcggtgcggcaatgacagcggcggtttacagcgattcgatactgtttttaccgctggttattgcgctgtatctggttgtcgccggtatactggcatcgcgaaagggagtgggttaccagtgaattctcagcggaacacctatttctgcacgaaaagtattttcagagatagtttctgatgtaaaaggaccgaagccaatggttctggcttcttcttcccaataaggataacggatactttcaggggaatcagcaggaatgatgtgtatacattcaccttgcagataatggagtacatgtactaattcatgatacaaaacagatgcgtgaaattgtttttcactcagaccttcgctgttccgttgatctgccagatcaaaatgacaatgcaaatcagcgcctgtaccccggccatttcctgaatctttgacacgatgaggaatagtggcaagttctgatgatgtgagatataccaccagcttttctgatttaaattgcaacagtgtttcaatacaattaagcagtatgcgaccggaatcagtgctgttaattaaatctatcgcaccattaaaacgtaaaaactgaatgaagttactgtccttaaatatgagattttcacagtatcggatcaggctgacatcagaagttttcctgcattccgctaaattatccggtgaaaacgaaatatccggtgccggggatgctgtaacagaacccagtttcataaaatctccatgtaaaattaatggtcagcgggatattgttatattctgtcagctctcaggataacgcagacaaaatacataactttcaataaatgcaccgtacggccattaatattccggaaatagccagcccggcagataccgggcacaacatggttttcctcaccgggaaaaccgctttgaaccggcaacacaggcaatcacaccacaggttgacgcaaccattacggagctgacggtttcattcagtaaccacgcggaaagcaccagcccaaaaaatggttgtaacagttgtagttggctgacaccggtaataccgccttccgccaggccgcgataccagaagaaaaaaccaatcagcatgctgaataacgaaacgtaaatcagtccgccccaggcctgtgccggtatgccgctgaatgtcaccggcaggaaaacaatactgagaatcagcatcagcggcagagaaagcaccaatgcccagcaaatcacctgccaactgccgagtggccgggaaaggcgggcaccttccgcgtaacccaatccgcacagcaacacggccgctaccatatacaaatccccggtcagggtgctttttccgccctgaaataaagcaaaccccatcacaaacaagctgccgaggacagaaaaaagccagaacgccgggcgcggacgctcattgctgcgcagtacaccaaacagtgccgtcgccagcggcaacaatcccagatacacaatcgagtgcgccgaactgacatactgaagagcaagggctgtcagcagcggaaacccgacgacgacacccgccgccacaacgatcagcgacaacagatacttcgcagcaggcaaacgctggcgcagaacggccagaatgagaagagcggcaataccggcaatcgcagcgcgggcggttgtcagaaaatccggtgcgaagccggtgataccagccttggtggcgggcagggagccgctgaaaatcagcacgccgataaaaccgttgatccagccgcgtgttgagcgggaaactgttgttattgcattatccatcctgtactccgttaattacgtcttgttattacagagagtaatgcggataattatgacaatcaaaaaattgtcatggatacatttgtatggcaacaccgcgttataaacagtacgtcgatacccttgctgcccgtatccgtaacggtgaactggcggccggaacacaattgcctactcatcgtgcttttgcggctcaggaagggctgtcattagtgacagcgtcacgtgtgtatcaggaactgatcaatcaggggctggtcagtggtgaaaccggacggggaacatttgtcagagatatcagtttattaccggttaccggtattgaatgtgatgtcactccggcaatgtatgaccttaactttatctatccggaagtcacggaacagaccgcattactgcgccacacgctgcgccggttatccatgagcggcgatctggaaagtctgctgcattatctgcctcacgccgggcggcatcaggagagggttgttgttgctgatcacctgaagttgcgtggtttttctgccgttgacccggatactgttgtcatggtcagcggagcccagcacggtctggcttccattgttctgagcatgttcagccccggtgatgtaattgcggcggatgcactgacttatcccgggtttaaagcactggcacaaacctgtcatatcgaattggttccggtgccggttaccccggaaggcccggatttggcagcgctggcacaattatgccgccagcggaaaatccgcggctatttcaccatgccgacactgcataatccgctcggctgggtgatggatctgacatcccgcaggaaactgataaaccttgcccgggaaaacagattttttctgatagaagacggctcttatgcttttctgcagaaaccagcaccggctccgctggcagaactggcgccggatatcacattttatgtcaccggattttccaaaaatatcgccaccggcttgcgggtcggattaattgttgctcctccggaatatattgctgagctggaaaaaattatccgcatcactacctggaatacaccagcactgatgaccggtattgtccgtgagtggctggagcagggcgaagccgaaaaactggaacagaaaaagcgccgcgatgccaaagcccggcaaaaaattgtcagccggatttttgctgatttaccccatatcgcacatccggccggctattttttgtggatcccgttaccggaaaatgtacgctgcgatgcggttatcagccgcctgagagcggccaatattgccgtcagcccggcggaatcttatgccgtcacccgcgatatcccgcaggctatccgtgtggcggtcagcacactgccgtatgatgacctggaatccgcgctgatgacggtcagagacaccattacctatctgatggatttatgatgttatgaaaagcattcacgaatggcatgaccggcactataccgtaacaacagatatcaccaggctggatatcggtaaaattcatgactatctgacgcattccgcatgggcggaagggatcagccgggagttggttaatgaaagtatattgaacagcctgtgtttcgggttatttgccggtacagaacaaatcggttttgcacgggttgtcaccgatggggccacattcgggtatctctgtgatgtttatattatcggggaatatcagaaacaaggactcggccgctggctgatggagtgctgtcagtcacatccggtgatgaaccggctgagacgcattatgctggtcacatcgtcagccccgtggttatatgaaaaatcgggttacagcccggtcaaccgggaaaattatatctggcagattgtcagaccggatatttataaacagtgaaaagggatactgttttatcgtatatacgctgttaaatcagtgtgttgtttaattaaataatactattatatatattgttttcccctcagagaaaacgatttactttgtgattttacgggaatatacttcatgtgtttatttcttgcggagaacacgtaattggacagtcatagattatttatcaaaatacattgatcctgccggtaattctgttttcctctgactgccggcagtaatactgcggcagtacctccctctgtaaatggtacttccttatttaatttcgcttatctttcacgggataggcccgaaaggacggatttatcatgaatctctatatgctggcgttattccctcctaactgattatttttcggttaattcaatttaaattgccatgcttgtgcaccgtatcttgctattccgtttattcagaacggaagggacatggctttttattaaaaaattcacagtacgtattcatttatgaataagcgtacaggctatcttttgctgataaggaatatatggacacaccacccggacccggaaatatatcatttcccgggctgtccgttatcatgacagttatttaaattaactattaaatcagacagtccggtgaaaaataaatgactcagtttatctgaggaaataaaaggaatcgtaccatgactgtcaacgttaaccgcactgtcactccggctgtgcgcgataataatactttccctgcggcggtatatgctgcaaaaacaccagacgaaacattagcagaattacattctgatatgctggggctggatgaaattgatgcccttgaccgcctgatagaacatcaggaaaacgtggtggcacatgacaaagcacctcccgcgtttattcagtttatttccgcatttcataatccgtttatttatgtattgctggcgctggccgttatcagctttatgacggattatctgatccccctgcaacagggcgaagacactgacctcaccggtgtactgatcatcggaacgatggtttttctgagtgtggtactgcgtttctggcaggaataccggaccaacaaagccgcagaagccctgaaatcactggtaaaaaccactgccacagtactccggcgtaaaaaaggacgatctgtccgggcagaactgccggtaaaatgtctggttccgggggatatagtagttctgagcgccggggatatgataccggcggacttgcggctgcttcgttcccgtgatctttttatcagccaggccattctgaccggggaatcggttccggtggaaaaatatgatacccagggagatatccatgaaaaagatgccgcaacgataacagaaaacggtcagtcactgacggaatccggcaatatctgcctgatgggcaccaatgtggccagtggcacggcactgggtgttgtggtggcaaccggtgacaaaacctattttggctcactggcaaaatccattgtcgggactcgctcacaaacttcattcgatcgcggggtgaatagtgtcagtatcctgctgattcgctttatgttggtgatggtgccggttgtcctgctgattaacggatttaccaaaggcgactggtttgatgccacgctctttgcacttgctgtcgcagtcgggttaaccccggaaatgctgccgatgattgtcagttcgaacctggcaaaaggtgcaattgcaatgtcgcggcgaaaagttatcgttaaacggctgaatgcaatacaaaattttggtgcgatggatatcctgtgcacggataaaacaggaacgctgacacaggacaatattatcctcgagcatcatcttgatacggagggtaataccgatgaagccatactgggactggcgtggctgaacagctttcaccagagcggcacacgtaacctgatggatcaggcgatcatccgtttcgggcgcggcaaagccgaaacagaatctctgcacagttatcagaaaattgacgaactgccgtttgattttgtccgcagacgtctgtctgtatcagtaagaaaaccggatggtaccgccttgcttatctgtaaaggtgcggcggaagagatgctggcgtgctgttctctgatccggaccggaaatcatatttctcctgcggatgatgagaaaaaacaggccattatggcgctggtcaatcattacaatgagaccggattcagagtactgctgctcgcagagcgggttctggatagcaaagagcagggattgccgctctccgcagacagtgaacaaaatatgattttatgtggaattctgaccttcctggatccgccgaaagacagtgcggcaaaagctcttaaagcactgaagcataacggggtaaccgtaaaagtactgaccggggacaatgcggttgtcacagcaaaaatctgtcgtgaagtcgggctggatgcctcgatgagtatcagtggtgatcaattggcgctcctcggtgatgaggaactgaaacaggtggcgcaaacacacactattttctgcaaactgacgccgctgcaaaaatcagccctggtcaggattttgcaatccgccggacataccgttggttttctcggggacggcattaatgacgcgccggcattacgggacgcggatgtcggaatttccgtggacagcggaacggatatcgccaaagaatccgcggatattatcctgctggaaaaagatctgatggttctggaggagggtgtcattaaagggcgcgagacattcggtaatattattaaatacctgaatatgaccgccagctctaacttcggtaatgtattttctgttcttatcgccagtgcctttattccgttcctgccgatgctggccattcagttactgattcagaacctgctttatgatatgtctcagcttgcgctgccgtgggataaaatggataaagaattcctgcgcaaaccccgtaaatgggatgcgggcaatatccggcgctttatgatctggattggcccgacatcgtctgtatttgatatcaccacctttgcattattatggtttgttttcggggcaaacagtccggacagtcaggttttattccattccggctggtttgttgaggggttattatcacaaacgctggtcgtgcatatgctgagaacacaacggatcccgtttattcagagcacagcaacactgccggtattattggttaccgggattgttatggccatcgggatctggctgccgttttcaccaatcggaagttatatcgggcttgagccgttaccgtgggaatatttcccgtggcttgctgctacgctggtcagctattgcggtctggcacaaatcatgaagggtatttatatccgccgtttcggaatgtggctgtaagttaagatatgttgtacctgttattcagctgatttttactgaataataggtacaatcagagtatcaaaataaaaggaatactatgcacttagaatttaaacggctcactcagataaaaccggccgatattaccgcactgaacaatcacccgaaagtgttacagcaaatgccgctgggtagtccggattttgatgatggaaaaagccgcaactgggcagaagaaaaagacgctcagtgggaaataaatggatatggcccttgggcatttgtgatcgacgatgtatttgcaggctggggagggcttcagaaagaaggtgatgatgctgacctggcgctggtacttcatcctgatttctggggaacgggaaaaatcatctgtgatgaaattatccgccacgcatttgatgaaatacacttaaccagtatcaccattttattaccattatcccggaaagtttcccggtttataacacgttacggatttcagccggatggttctgttaactatgatggtgtggatttccggcgattccggttattttcagatcatacagatggacatgattaaataacgatagattttatttgtaatttataatctgatatataaagtatcccgctgccagtgggatgacaaacggaataatgagcatcagatacaatccgccaagcccccgggggctactaccattaataacatcctcaaatgttgattctgaaaaataatgacgaaggacatcatcactgcattttttagcaaacggaaataaaggtaaacaaatgcaggcatagattatccataaaaaatgaatggttacattatcatttaatgaataaataaacatgccaaaaacaaaaaggccaaggcaggatttaccccaaaaatcccaacttttgataaaaagacgaatagggtgttttctttttttatttgctatatggcgctgtcttattttttcttttgtatagtttcttccactcttactcattgaactatctcacaaaaaaggaaatatttggggatggacatccggccaatttatcatggctgagcgtagtgaacgagaggtttttgaaacgcggagacaaaacacccgtcagcgggtgttttatcttgtcgggctgatgtgacttattcgtcgaaataccaatatccctgattgataaattcggttaattccgcaacaaaaaccgggttctccagtgcttcaccgagctcattcacgccgacttcggttaaccggcacaatgtatccgcacctttaatttcggtggtcatccagccttcggtattaacgaagaaatgttccccgatacgcagaacacgcagtccgctcagtcgtatcagtttttcaccggcattcagagcactaagtacttcttccggctcatacggcggttccgaaggtgcaatatccagctcatggcgcggggtagttgcaaaacggcctaaccactgttcgaaatcacctggcttgttgatcatttcaatcatcatggcacgcaggcgttcaacctcataagattccattgaacctgagttttcacgtactttcaggtcagggtcgccataattgacgccacccagatcctgttccagagcgtagtctgcaaaactgctcagcaaatcacgtccggtcggtccgcgaaagccgacagaatagttcatggtatcttcgaaggtgaaaccatcgtgaggaaatcccggcggaatatacagaatatcgcccggcgccatttccacatcaattatcggctcaaacgggtcgacatgcagtaatgccggatgtgcgcagaactgacgcatgggaagggcgtcacccacacgccagcgacggcggcccatgccctggataatgaaaacatcatagttatcaatatgtggtccgacaccaccgccgggcactgagtaggaaatcatcaggtcatcaagacgccactcaggcagcacgcggaacggttttaccaattccgcagccggcatatgccaatggttgacagcctgtaccagcaatgaccatcctttttcacctaactggctgtagtcctcaaacggaccgtgactcgcttcccatttgttatcaatgaagctgaccaggcggctgtcaacttccggctccatagccaggccggccagttcatccggcgtgatagggtcggcaaaatcaggaaatgcatttttcagtacaacgggttttttctgccagtatttttctaaaaattcaggccagttaagattcagtttgttaaccatgtgaccacatctatatgaggaaataagcggataattatagaagcaatgcgctgtcatatttttgtttggggtcaagtgcgggtcaataacttttgcggggagattcgtgggcttatagtgattcagttgtcggacggtcggagacaagaaatcgttatccacgataaatgaaccagcatgatttagcctggcggaataacagatttcgttatttcatactttagttcgcataatgtatattatgttaaacgatattcatgggcaccggcactctgatacacgtcactaccccaattaaatatgccatctttaacggtaatggtggtttttgtcagtagtaactgtccgtgacggacggttatatggcccgttcaaatattatcacgactccgccagtaatggggtctatatacaaggtacaatggaaaacggtgcccttaccggctcagttaaacaattcgatactgccggaaaattagtcagtgaaggtaaggtgactaacggaagaatgcagatcctgaagtaatacggaatgagtctgccgggagggataattgtcatactccggcgtttgcggtattcttcccggctcaggcaaaataacaggatattcattcatgacagcccacaaatccaacgatccgctgcatggcgttactctcgaaatgcaggttaatgcactggtcgaaaaatatggctgggcaaagctgggtaagttaatcaatattaactgttttaagaatgaccccagtgtaaaatcaagtctgaaatttctccgccgcactccctgggcccgtaccgaggttgagaatttatatctcgattcactggatgatgatgctgccaaaaaaacagacagcatctggccggaaggtccatggtaaataaccaataataccggcttccgttatttctgcggaaaccagtgtttcagttaaatcagcttttacaggattgtcccggttttttgattatttcaccataatcattcagtgctgccggtttttggctctgaatattatttaataccggtaatgtcggatccatctgccaggcattccagccgccgtcataaatccggctgttttcccagcccgccagttgggtcataaaccaggaaacacttgcccgccagccggtgccgcagtaaaacgcgacctggtctgtcggttcaataccctgcgttttccataaagcaaaaatctcttccggattacgtaatgtgccgtccgggtcatagtaatcggacatatcattcgaatttttaccgccgaatccccatattgccccggccggttcacctttgcgcggaatatagtcataaccggagattttgccggtatgttcatcccatgtccggttgctgataagtttaaggccggatttctgaccctgtatggcttctgccggcatggcaatagtgacctgcggattaaccggaatttccgcaccaaaatccgcaaccggtaccggaatattcagggtggtttctgttggtaattccgcatcagtccagacatttaaaccgccgttcaggaaacggacatcctcaacacccgcccatttcagcgcccataatacccgcaatgctgccatctgattttcagaatagacgacaaccggggtatctttgcggatcccgtttttcagcagattatttttgataacgtcaggttcggataaattccagaccggcgcattttctatccagtcggtattaaaatggaaagcacctttaatatgcgttgcataggattttgattgctccgcatccccccacgacacttcaaatatcaccggtttttgatcactggtataactttccggtttttcaccgttcagtgcggcctgaacccaggcgggagaaacactcagaaagtaattcgggtatttatccatcggcagatcagaattgctgtactggataaaggatttaaatgccctgacctgaaaacctttggcagcaaattcagcagtaatacgttccagtgaatccgggtcactgtcgtaaaataccagggttttttctttggaaatccccttttcttcgacaaacgtatcaaatttattctcatcgataaaatccagccagccggtcgtaaactgcatcgcacctttaatatggccgccgcgggccgcgcctttatctttaaaaccgaaatataaactgtccggccgggtatcgataataatgtattccggattgttcaggttctccgacaattcttcaatgccgatctcttttaccaccgtctggtcacaacctgagagtaataacggtatcagaagaaagagtgattttgttttcatatgtgatcctataaacgacattgccctgaacggaaaaaataactggtgatccaaacaccagccataatcatgaatgtggaaatccatccctgccaggagaaataagcggttgccacaagggaattcgtgacggtacagccgcctgccagtgttgcccctgctcccataacaatcccgccggtcaggcgtttaacgacggtaataccatcaggcggaagtcttaatctgaattctttgcggataaccgcacttatcattgaaccggcgaaaataccgataacaaataaggttccccagttaaaataacgctgctgtccggtgatcagatactgaataacattgccggaaggaacagcaacgccatagccaaaattacgtccggcctcagcactgaaaacccaggcaataatcccgagaataccgatcagcataccggtaatattcagcggcagataattaaagcgtccctgtgaaggtggcgtataacggggatgataatgctgataaatcagtaatccggcggtgagaataattaaaaacgcgaccagaaaccacggagagatatccagtgttttataaatcgtatccggctgtgcgggatgctgtaataagggttcaaaccaatgtttcaggctgcctttctgagcggtcgccatggtaacaacaaaggcaaataaggcaatccaggtaccggttaatccttcaccggaacgaaaccatgcgccgctgccgcaacaaccggccagtaccatgcccgcaccaaataaaagaccaccggcaagtgttgcggtgattggcagatttccttccggtatatgtaataatccggcggattccagagcaaagaaacctgcggactgaatagtgaccgcaatcagcagtgcggtaagaaaccgggtatttcgctggtaaagaatgtttctgaatccggaaacaaaacagaactgacctgactggagcaatccgccgaacaggatgccgataaataaaccactgaccatgaagaaaccccggggaataaacaactgcgtgtatctgtgaattttacccgccccattattcgccgttatggcgcaaaatcaagttaaggatagttaacctcttatcagatatatctgctgtcccggcggtgaacactctcttaccctgttcagacactagacggtaaggaacacaacgcactgataaccgggaccgtaaatcttctggcgcaacagagaattaaaccgccaatccggaaaagcggcaacgctaccggtgccgccgactttttaacaacgcagcatattttcaacatctgctcaccttttttataattcacccatgtgattataacggtttattttcaattaccttgaccgctttcccgtttcggacttttagtcatattttttagtgacttagcctttcctgttttcttaagatgaaaacggatcgcattaacacttgatgttatttgtttcagaaaagttgtttcagggaaattcaccggtaacagccggtgttttggtcaggcattatataaaaatgagtttttaacaatgaaaataaacagcaggaaactggcactggtttcactgatcctgtcatattcacaattctccgccggggcggaaaataccgcaaaacaggatccggacagtgacacactaatcgtcaccgcttcagggcgtgaagaacagcagcgaaaatccaccgttaccacccaggttatcgacagcgaccagattgaacgctcacgggcggaaagtctgaccgaattactggcacagaacagcgtcggctttttcagtgaatggagtcccgggcagacatccattaatatccgcggtgctgcaacggatggtcagggaaaagattttgccggacaggtgctggtattagttaacggccgccgggcaggaaccgcgaacttatccaaattatcaccgaaagatgtcagccggattgaagttatccggggcccttcttcggttatttacggctcccaggcgatgggcggcgtgattaatattttcctgaaaaacggattaaccgacgaaggcgggaaaatctcagcagaaaccggatcctggggactggcacagacttacggcggctatggttttcagaatgatgacggcgatatttacggctatgtcgggtttgaagctggacgccgcgatgattaccattccgggaaaggcggccacaaacaggaaaataccaactgggaacgctttggtttaagcggtaatttaggctggcagatcaacgaaagtaacctgctcgatgtgtcactgcggactgacggtatttatgacggcggtttccggggatcaaccgggaatatttacgccaaagatacccgttataaccgttcagcggatgtggtctggaaaaacggcactgacgacagtattttcagaatgaacagccacgcctattttgtgcaggatgtggataatttccgctgggcatcaccgttaaccgcaaaaacccgcagtgatcataaccgccgccaactggatatttacggcgtgaaattccagccggtgattaaactccatgagcagaacgatctgttattaggggtggattacgaatacagccgtctgcgttcagaacgggatcaggtcagtgtcagcggcaacccgctgaaacaatccgcgccgtatgataataaccagactgaaaatcagtatgccgtttattttgatgaccggcagagtttatttgatgacagctggataatccgcggcgggatgcgttatacctacgggaaaaccaatttcgataaaacaccgaacctggataatcagttcaccggcagtgcctcatataataagttaacctggagtctcggtaccaactatcaggtcaatgactggctgaacctgaaatcctctgtcgccaccggctaccgtgcgccgaccgccacacagttgggcgcggattatattacgctgtccggtacgcaatatctgggcaacagttccctgaaagcggaaagtaaccgtcagtttgaagtgggcgcgacacttggtgattccctgaattccgtcgatattgccctgttccaaaatacgattcagaacagaatacagaccaacgttctggcaccgaatgtctatcagtacgccaacagcgacgatgatattgtggtacgcgggctggaaattaacagccgtgccaccgttaaccgtgtatttgactggcagacagactgggattgggtcatgcgtttaaacggcagctggaatttcgatatggaagataaaggcgccaaaataaccgcaatcaataacagtaataaagttcagcgcatgtatcagtatcaggcggcgtttattaacgagctttattttaccaatgcccgttatccgtggagcctccagttacagggaattctgcgcggaccgatgtggtataaaacagaggaaggaattatcccggatgtccgcccttattcttcttatgtgatgcgcaaagcgccgtttatggtctggaatcttcaggcggatgtggatatcagccagtcactgacgctgtacggacggatagacaatattctggataaaaacgagcatccggtattttttgccctggatgaagacccgtatattatgctgccgtcaaaatccaacggcagtctgggaacctctatgccgggccggtcatttattgccggtgtgacataccgtttttaaccggcaataatgaaagtcctgattataattatcactctgagcatggccctgtgccgtgctctgcctgctttcagtatgatggcgcaattatctgcgccggtcacgctgaacgaaaaaccgcagcgtattgtgactatcttttcatcaaataccgaaattgtggcgatcctcggactggctgacaatatcgccggtattgatgcctacacctatttcccggatgaaatcaaaaataaaccgttaatcggcggccgcctcgggttttcccttgagcggatcattgaacagaaaccggatctggtgattatgacccctgcccgccaggccacgcatcagttattaacaccgctgcgtaaattcggcattcctgtgctggtgctggagggaaacagtattgaggaaattattcataatatccgtctggtggcacaggtcaccaaaacaacggaaaaaggcgaacaggtggcggcagaaatagaacagcggctgcacaatgttcagcaaaagcccgcaggttaccgcgcaccaagggtcattatgatcaccggtcaggtcagtaacgggttattactggttgccaggccgcaggtgtataaaaaaacaccgggttacaccgccgattccattttaaaagcgggcggaaccctggcgctggaggaatataaacaggccggaccggcgctgaaacaggtatctccggaagtggttatcgccgccgacccggatattattttgtacaccatttccggagacaaaatccgggatttactgacacttcccggctggtcacaaatgaaagctgttaaaaataatgatatttatccggtcaaaagtgcgtatgtgcttattcccggcccgcggattattgatggcattgaatatatgtctgacatctttgagcaatggagcctgagacagtgaaaatagtcagtctgttactcattttcttcgccgcatttattttctccgcctgtgcgggacatacatgggaaagtccgctgaaggtggtaagcgccctgttttacagtgatgatttgacatcccgcttattaacagaatggcgtttaccgcgtgtgattaccgccggatttaccggcgcattactgggattaagcggtgccatttttcagggagtattccgcaatccgctggcagagccgtggttattaggatcctccggcggtgccgcgatcggcggaacagtggcattattagtgccgctcggattaccgctggcggtatcgctgccgctgtttgccttcagcggcgcactggcggcgatatttattgtgttatctgtctcccggattgccggttcactggataccgccacattgttattaaccggggtggcggtcagtgcggtattaaatgccgcccgttcgtttatgatgatggcattatccgatgaaagtaccagcctccaggtggtattaagctggattctgggcggaatacaaactccgtccggagaaggtctgatcatcagcctgatattaaccctggccgccattttattatccgtttatctgttatctgacgggctggatttaatgggactggacagaacaatggccatgagtttcggtttatccgttgaacggtttaccgtgctggccttaattgccggatccgccattgtggcaattgccgtttcactcggcggcgttgttggttttatcgggctgattgccccgcatattgcccgctggcaggtcggtgcccgtcataaatatgtactgcccgcctccgctgttattggtgcggcactggtgatgttctccgatgcattatcacgcagcctgctgccgccgggggaaataccgctcgggctgatcaccgcctttatcggcggccctttctttatttatctgctggcgaaacgggtgagaaaatcatgatcacagtgaataacctgaatgtctgcaaacaggataaaacaatactgacggttgactccctgcatttacccgccagaggcagcattgcccttatcggccctaacggctccggtaaatccactctgataaaggcattatctgggcttgaccgggaagtattcagcgccgttaccctggacggaaaaaatatcagccgttataagggagcggcgcggatgcagaaaatcgggctgatcccgcagagttttaatccctgctgggatcagcgcacagaggaattgatttcgctggccgcagagcgggcggctgacccgaaagccgcaaaagcatccgcctgccggaaatatgaattacagccgttactggataagcactggcatatattatcgggcggggaaaaaagccgggtattgaccgcaatggcactgatgtgtgatccgcctgtgatatttgctgatgaacccggtgcggcactggatataaaacaccgcatgcagctgattgaggatttaacggcacagggaaaagaaaaactggtggtggtgtgtctgcacgaactggatatggtattccgctattttgaatcagttattgtgctatcacagggacaactgcgctatttcggttcatctgccgcattgctggaatcctctttattaaatgaagtctttgatgtggaattccgcaaaatagagatggatggttacagtacggtgtatgcacatacgattatccgtccgtaaaaataacccggcggctgttttctgccgccggattaatgtttttatgacataaacggataatcggtatacccttcggcaccaccgccgtagaaggattccggacgctgcgggttcagcggtacttttttcgccagacgcgcggccagatccgggttggcgatataatcacggccaaatgccaccgcatcaatcagccctttttcaatcagatcttctgctttttccggggtataagccccggcaccgataatcacaccacggaacagagaacgaaccttacgacggaaatcttcgctgtacggcttgccgcctgcccagtccggttcagacatatgcagataggcgatattgcgtttattcagttcctcaatcagatacagggcatccgcctcttcatccgggccgttgctcatattctggaaagaaccgattggtgacacacggatcccgatgtgttccggtccccactctgcacagactgcatccaccacttccagcaccagacgggcgcggttttcgcggctgccgccgtactgatcggtacggtggttggcatccggtgataagaactggtgcagcagataaccgtgagcggaatgcagctctgccatatcaaacccggcctcgcgggcattagctaccgcctgacggaaatcattcacaatccccgggatttcactggtttccagcgcacgcggcatggaagtatcaacacggatagcatgaccgttttcatcacgcagtgaggtgcgggtaccggcactgatcgcagacggtgctaccggtgcctgttgtcccggctgaatgctgttatgagaaatccgccctgtatgccacaactggacagcaatgtggccgcctgcgtcatgcacaccggccgtgatttttttccaggccgcaatctgttccgggctgtgcagacccggcgcaccggcatagcctttggcctgtgccgaaatctgagtggcttccgagataatcagccctgcaccggcacgctggcggtaatattcacccatcagcggggtcgggatatcgccgggttcgatactgcgcagccgggtcagcggcgccataaatacgcggttcggtgcggtaaaggcgcccactttcagcggggtaaacagttttttctgtgacaatggttgttgtgacatagtaactccggattagaccagtcgactagttttcagataaataaaaacgcctgcgaaaaaattactcaggcgcggtaatcaatgtttcaacatgcgccagtgcactttccagcggcgcagtactgcgggaaatttttgcctgcaaatttgcccccagccataatgaataaaatacctgtgcggcgtgctgcgaatcgccctgaaacgtcagtgaattttcttttcgtccgttttccagggtttgtgccagcagcgcaatcactttactgacgcccttatccatcgcggcattcatatcttccgataaatcacacacttcggccgataatttgaccgtcagacagccctgaatacggctgtgctgacaggcatttttcagaatatcgccgtaatacgcgagaaagcgatcacggtaattccccgggccgtgctcaaaatgaccggtcaggcgttccaggtaatcttcgtaatagcgttccagcagagctacgccgaataattccttggagcgaaaatagtgataaaacgagcccttcggcaccccggccgttttcagcagctcactcagccccatgccggtaaagccgcgctgaagacacaggcgttcgccggtagccagaagatgttcgcgggtatcatgttcagtgtgtttgttcatgacaataccttaatagaccgaccggtctgttgcaagtttatttaaaacaaatttcgccccagcgtgccagaccggcggttaccgagccgaaatcgtttcctctgaccaccggaatacccggtaattgtgcctcaatcgcgcggcataacaccggtgaacggcctgaaccgccggtgataaagatagcatccggtgttgcgccgccctgctgcactgcatcattcaccagggaaatcattttatctttcggggaggaaatcgattcttccatttcagccgcgctgatgtctgtttccagcgtttcactgagcaggcggattgccgcacgatactccggtgaggcggaaagcgcgatttttgcctcttccgcccggcggacaatgctgtagcccaggctctggttatacacttccagcaggcgcagcagtttttccggctctgccgcatcccgcttcagttgctgtaacagtgtgagattctgacgggagtagaactctttctgtgcttccacattattaatggcgatcgggttccagaattgcatcagcggcatttcgataccggaagccgcgcggctgttcatcccgaacagcggcatcagctgtttaaaggccagatagatatcaagatcgtttccgccgacccgctgcccgctgtgtgccagcagactgccggtgcgatcggcctgaccccggtaacccggccccatgcggatgagtgagcagtcggtggtaccgccgccgatatccaccaccagcaccgtctgatccgtattcagtaccgactcatattccagcccggccgccaccggttcaaactgaaaggtaatctgctgaaaaccggcacgttttgccgcccgcagaagaatggcctccgcctgctgattggcggtttcgccgcccagtccgtggaagttaaccggtctgccgatcaccgtttcggtgatagtttcctgtgttgaacgctctgcctgagatttgatattcgccatcatggcgcagaccagatcctcaaagaagctgatttgcacatcatgcagcccggaagcaccgagaaaggatttcggggatttgacgtaatacacgtcacgcggatcattaagatagagttccagcgcggcctgaccgaacaaaatatcctccggcaccagctcaatactttcttcgcggttaaaggcgatagagcggcgtaataactgttcgccggtattatccgacggcagaatatcgcggtgacggaataagtgttcggagacggattcgcgtgtcggtgcacacagggtggacggaatatagacattatccccctccagcggtaataacaccggagtgccctctttcatcactgccactgagcagttggatgttccgtaatcaaaaccaataaacataatgcctccgctgtttgccatgccggaaaaaagccggaaactttaccgcagacaacggggaaataccaataaaaaacgcggaaacaacagacgggaaaagtgatccgggagcgatcccccggatcaggtcagttattcaacatcatccagcatggccggtgacggaataaagaacagtgtaccggtcacggcggtactgaatttcagtaattcatcggtggcaccggtttcttttccggcaaacatattttccagcattctgcgggtggtggagaaataacgggcgtagccgataaaataggtgccgtgctcatttttggccgggttggagaacggcatattggcgcggactattttcaggtcattgccctcttcgtcctgaatattggtcaccacattgtgggagccggggattttctgctcatcggtcagttcgacatcattgaatttatgacggccaatgactttttcctgatcttcggtgctcaggctctgccaggcatccatatcgtgaatgtatttctgcacaaaggcatagctgccgccggcaaatcccggatcttcgtcgccgataaccgcatactctttgcgctcatcctcaaattccgggttttctgtcccgtcgacaaagccgataattgcgcgtccgtccatataacggaaaccgtgaacttcatcctcacaggtcactgcaccgctcagagcacggctgataattgagcccagctcgtaacaggcggacacattcagggcgcggatatgaaagaagatatcaccgggggtggatacggcggtaaagcgcggtcccttaattgcttcaaaagtattcagttcacggggtttgcccgcatccggaaacagtttttgccacgcatccgccccgaagcccatcacacaactgacttccagtttcggaaagcggttacggatgctgcgcagaataccggacaggttattacacagcgtaacaaccgtctcccgcgtttgcggggtatctgtcagattaaaaacgaggaaataggaattctcaccgggcgtgtcagtcacattttggtatttcatactttctccatacatttcttattctgaatagtatctgtcgttatggtacaccaattgacaggctacggacggtgaccgggcaaaaatattctgaacggacatgtaatacccgtattttatgtgacagtgtcaccaataagggtttgcagatatcagcgcttacggcggaacagctgtaacagtccttttacggtcacatccagctggctgccttcctcatagtttgcgggtaccacataatttgcccgctcttctgcgatcagcttgccgaccttgttctgtgtttccgggttgccccatttcttctgatcaaacactgccagtgagaaaccgccctgataacgcaccatcttcatggccgggatatcggtatcaccatcaccgaaatagatcatatggcggaactgcacagcgcgttcttcctgctcgataaaatgattaaccgccacattatcccacgagttatgtattcccttgtttatccggaataaaaactgtgttttggtggtgtagttgatagcctgagcgggccactgtgctgtttttccgtcagcggaatagtgatatttacaggcaaaaatatcgcggaattcatggccgatagccgtaccacgaatcataccgtccagtccgctggacagaatatagtgttccgggtccagcccctgctcatgggcccaggcattgatccgggtgaaccactctgtcaccccgggaaacaacggaatcgtcgcaccgtgtttcttcaggttttcaatactcagttcctctgactttttattcgcggccttggcggccagtaatcccatataggagaggatttcgtcgccgtcatctgctttggcaaaccgcttcacttcccgccagaatgctttcgtgtcactgatacccaatgcgggcatcagcccgtgttccggacaatcaccttcagccagggtgccgtcaaaatcataaatcagcgcacatttgagtttttctgtcatttcacctcttcccctgaagcgcgcacggtttcacggactttttccgcaagacgctgtgcatcctgaataatttcattttcattgacggtcagtaactgccggtcttccatcaggatcacaccgtcaacaatggtatgacggacattggcgccgtttgcgccataaaccaaggcggcatacggactatacaccggcaccatattaggtgctttggtatccaccacaatgatatctgccagttttccggtttccagcgagccgattttatcatccatatgcagtgcacgggccgatcccttggtcgccatttcaaccacggtcagcggcggcatggccgcgcggtttttggtttccagtttatggattttaccgaccagattgagttcattcatggtggttaatgtattggaggacatcggcccgtcggtaccgagaccggtgcggatccctttttccagcatttgcgtgaccggtgccacacctttggcggatttggtgttggcactgatattgtgtgccaccccgacatcatattttttcagcagatccaggtcattatcatcggccataatgacatgtgccgccagcaggcggttattcagcacgccgatatccgccatatactgtaccgggcttttcccgccggtgcgtttggctatctcttctttttcgcgatccgtttccgccagatggatcatcaccggtacattcagctcttcagacagtgccgcgattttctgtaagttttcagtggtattggtatacggggcatgcggggcaaatgccggtgtgatgcgcggatgatctttgtatttatggataaagcgcaccgcatacgcgatcccttcttccggcgtctgtgcatccgcaaccgggaaattaatgatggtctcacccagcacggcgcgtaaacccgccttatctacggtcttcgcaacctcatcttcgaaataatacatatccgcataggtggtcacgccgcctttaatcatttcgatattggccagattggcaccggtgcgcaccatatcgcgggaaaccagtttattttccagcgggaaaatatagcggtgcagacgatccggcacatcatccccgagagagcggaaaaccgtcattgagccgtgagtgtgggtgtttatcagccccggcatgacaatatcgccttttacatccagcactttctttgcctgatatttcgctgtcagctcagggccgccgacggcgacaatttttccgtcactgaccaccacggtaccgtgttcaaacaccgtattttccgggttcatggtcagcacagtgccgtccgttatcatcaggtctgccgggtcggcagcataagcggagcaggcagctgcaagcagtgtggtggcaaacgcgcgggacaatgacatagtaacctcatgactgaacggaaaaacctactatatcaccgccattaattcacttccaaccagcggatttcattgaaatgcggacggataatcactagtattgcagggtttataactccttccatggataacccctgtttatgctgaataactatgttctgcgcagtgtccgctacatgctggatctgagtgacgcaaaaatggccgaaatcaccggacttgccggattaactgtcaccaaagcgcagatgagcgactggctgaaaaaagaagatgaagcggattatcagctttgtgatgataatgtgaccggtcattttctcaacggactgattattttccgccgcggcaaagatgaaagccgcccggtaccggcggtagatgcccgtctgaccaacaatattatcctgaaaaaattgcgcgttgcgtttgaactgaaggatacggatatggctgatatttttcagcgtgccgacttccgggtgtcaaaaccggaaatcagcgctctgttccgcaatccggatcataaaaattaccgcgactgcggtgatcagctgctgcgttatttcctgaaaggtctgacatcccgcatccgcggctgacagattatgatgccgggtgttatcacccggcagagtgttataccggtttgttattctgtttctgcttgcggtattgcagccagccgaataaaaccccggcggcggcaccgctcagatgggattcaactgagacgaattgctgtcccggaaacagtccgctgatcatgccgccgtaataaatcagcaccacaatgccgataataatatccagtggtttgcggcggaaaatcccctgataaatcagtaacgcccacagaccgaatatccagccgctcgccccgacatgtacggccgtccgcccgaataaccagaccagtaatccgccgacgataataataaacagggacgccttaatataatgtttcactgacgggatcatcagtaacacactgagaattaacagcggtggcaggttactgaataaatgcccccaactgctgtgaataaaaggtgcaaggaaaataccgaacagcccgttaaccgtacgcggctcaatacccagcgcagttaatcccccgccggtcagtgtggtcagtaactgtaccgccattaaaaacagcacaaaatacagcccgtttctcagatagatttttataccgctctgcgcaggctgttctgtgttatcgatagtgttttttgtcatttcccggtccgttgggtgatggagtccgccccactatagcgaaattttgtgtcccttccatcctgattttttaaatgcaaatgaaaacaattaccaccattattgactgatggtcggtcaatgtatatgctgccgctgttctgatcaactgagaaaaaccctcatgcgccgattactgagttcttaccctgtcgttattacatctgttttttctgcctctttgctgtctgctccgtctgtttcagcggaaccggacgatgtggtgtatgtcaccgctgcggatgatgttcattatgagccgcacggttatggtgccctgcgtcagtcctcggcaacaaaaggctccgccgcactggcggaaacgccgcagtttgtatcagtgatccgccgtgatcagctcgataccctgccggctgagtccctcagcaaagcgctgcgctacagcgccggggtggccagtgaaaaattcgggggcttcggcaatagcattgatttttcgaaaatgcgcgggtttgatgcggattattatctcgacagcctgcgggtcgcgggtaacagcgggagctggggtgcacaaattgattcctggctgctggagagcgtcgaagcggttcacggcccgtcgtctgccctgtatggtcagggcggtgccggtggtgtgatcaacatgcagtcgcggctgccccgggcggaggaatcccatcagattcagtttcagagcggaaattatgataacaatgcgctgcgctttgacagcaccggcgcactgaatgaggatgaaacctggctttaccggatgaccggctcggcagcatcgtccggttcacagattgaaaatactaaacagtcccgttacctgatagcaccgtccatcacctggcaacctctgaataacctgagctggacagtggccggtgtctatcagcatgacccttatgtcggttactacaacacccttcccgccgctgctctcggcctgttgccgtcgccttatggctctcttgacaggcaccgcaactacagtaatcctgatcatgaaaaatcgggccggacacagcaatccattacttcgctggtcagctggcaggtatcgtattcactgacactgaaacagaacctccgctatgcggatgtgaaaacgcatatccgccgtgattttacgcgcggatttgtgcaggataaccgcctgctgacagcggtgtatcaggattccccgtcccgggccagaaccctggcagcacataaccaactgatttacaaaaccctcaccggcccggtatcccatgaaattctgaccggctttgatcttcagaccggtaagctggataaggactggtcaggctcgcaaacggtaacatttgatccgtacggttctcactaccgcccgcagtttacgccgcacatgacatcatccacctccaccggacagacttaccggcgctatggtgtttatatgcaggatcatctgcgctggcagcaatggagcctgattttaagcggccgttatgatgattcctcactgaaaaccaccaacaacctcagcggaacaacacaaaacagtgatacctcagtttacagccaccgtgcggggctgacctacaccttcaccagcccgaataatcccagccccgagtaaatcgcattgcccagcaccacgccgtaaccgcaggtcagccccgctttttgtccggaactcagtgtggtctgcaccacaataaacagatttgccccgggattgaaaaaagtcaggacaaacaaaaaaagcgtgacggcaatgctgtgcagcggatccataacggggttctccccggaaaagcttaattcagcttaacgaaaaatcgcggcttaacgcgggtttaaggaaaattagactatttagtttattttagcgggcaatgcttccggacggaaattgtaccacgatgaaaaaccgtattttgatagtaaccacactctttttattttctgtatcacctgccggcctggcagatgatgtgcgggtcagtgtgacgcatccgcaaataatccgctctgcaccggtcattaccttgccgggaaaatttgtggccagaaatgaaattgctatcggctcgccgctgcagcaacagacggtgacggcagtatttgctgaggaaggtcagccggtggagaaaaatcagttgctggcaaccctggaatcccctttgcaaagtgccgctgtccggcagttgcaggcagaaacggaaaaagcagccgcgtatatccggcagcaaagtgtgctggcggcgcaatctcagcgtgatctgacccggatgacaaaactcgcccgcagcggcgttatttccgccagtgaatttgaaaaagccaaatcagacacccaggcccagcgggcactggttgatgccgggcaggcagaactgcgtcagttacaggcgcaactggcacgggaaaaaagccaggaggataaatcaaaaatctatgctccggccgctgggattatcagtgagcgccacgcggtacagggcatgctgtctgataacaccctgctgtttaagctgatcgaaaacggtgagatcgaatttgaggctactgcgggggctgatgaactggcgcaaatgcaggaaacgtcggcagtcacgatgaaaacggccaacaaccggcaactgaacggcactgtccggtttatttcaccggtactttcctctctgacacagtccggccgtgtacgggtcactgttacggacggcgctgatttacggcagggacagaccggcgtactgacatacacggccgcgccccgtgagtatcaaagcctgccttacagtgcggtacgcaccggtgcgaaaggtgaacgcacagtgtttatcgtgaaaaataacaaagtgatgcagcagccggtgcagaccggcgctattgataacgggcagattactgtcctcagcccgcttccgccggatgcggatgtggtggtcaatgcgcaggcatttttaactgataatgacaccgtcacaccggtgaaggccgcacaatgaaattacagctttcctcatgggctatcacccgtccggttccggtcattgttatttttctggcgctgaccattgccgggttattttcttttgcacaattgccggtaacagccaatccggtgattaacttcccgattgtgacagtgacggtcactcaggacggctcctcgccgtcagagctggaaaatgcggtgaccaaacaggtcgaacgggccgtttccggcattcccggcatccgtcatatttcgtcttccgtaacagaaggtatttcctcaactacggtggaatttaacctcgatgttgatccgtatattgccactaatgatgtccgcgagcagatctcacaaattcggggagaactgccgcaaagcattgatgaaccgctgattaaccggatagacgtcgaaggcggtgccatactgcgctacgccgtatcatccgataccgttccggcagccgatctttcctggtttattgatgacaccatcagtaagcagctgattatgttacccggcgttcagaaagtcagccgtcagggcggcgctgaccgggtgatccgcattgaaccggacgcggacaaactctctgccctgaatctgtcggtggttactgtgaatgaatggctgcgcggtgtgcatcagaacgcggcaggtggctcatcgcagtataattcgctggcccataccatccgtgtactgggtgaaaaaacaacggctgatgatattaaaagcattcagttgcctgctgaaaatgagcaatggataaaactgggtgatattgcggagatctataacggacaaaaaaccacccgcagtatttctcagctcaatggccgtgatgtggccgggtttgctgtattccgcgccaaaggtgccagtgataccgccgtggcggaacaggtaaatgccgccctgacggagatcgccgccaaacatccggaactgacgattgaactgatctcatccaccgttacttataccgaatcaagctatcagctgacgattaaaaccctgctggaaggggcattcctgaccatcgtgattgtctttttcttcctgaaaagctggcgggcaaccctggttgcggcagtggcgctgccgttatccatattaccggcattttttgtgctggcactgtttgattacagtctcaacagcatcaccctgcttgcactgacactggttatcgggatcctggttgatgacgcgattgtggaaatcgagaatatccagaaatacattgagcgcggtgagcgcccgtatcttgctgcactcaaagcctctgatgctattggttttgcgattgttgcgatcacactgaccattgtggcggttttcctgccggtcagttttatcggcggatttgtcggcaaatattttgtgccgttcggagtgacggtatctgcggcggtgttctcatctctgctggttgcacggctggttacgccgctgatggccgcgtatatcctgttaccgtcaaagaaaccgcatccggaatcagccgtaccgcgctggatagaaaaatacaccgggttgttatctgcaacactgaaacatcggaaaaccgcactggcgctggcattagtatttctggtgggttctgtggcttccgtgacccggctgcctgtcggctttatgccggagggcgatatcagtgtgacacagattgaagtggaactgccgcccggcacgccggttgagcagacacagcaacgcctgcggacactgacaaaatccctgaaagaccggccggagataaaatccgtttataccattgcgggtgtggcggatgatgcggatggtatcgcgcagcataagggggaaatcattctgacactggttgatcccggtgaccgtgaactgtcacagaaggaatttgagcacgcaatcgccccgctgttcagtgaactgccggatgcccgttataacttcagcaacagtaacggcggcaaagagttttcgctggttttcaccggcacagacccggctgaactggaaagtgccatgcaaaatctgcgtaacggtattgcccgcctgccgggattcagtaatgtgcaggtgataaaaccgctgctgcgcaaagagctgattgtcacaccgcgtcctgacggccccgggcggaccggcgtgagtgtcagtgaaatcgccgacacgctgcggatcgcgaccatgggggaatcaggctcccgcagtgccaaattcaatctgccggacagacaactggcattacaggtggtactgcctgaatatcagcggaatgatatccgtgtgctgaatgatttatccgtacgaagcacggctcagggaaatgtaccgctgaaagcggtggcaaccattgatttcagtgatgggccggcacaaatcgaccggataaaccgcgcccggaaaatgtcggtggaagctaatctgaccggtttatcactcggtgaagcactgaatgcagtgatggcgctgccggagtatcagaacctcccggcgacagtgtcacaactggaatacggcgatatggaatatatgaatgatatgtttatgcgtttcagcagtaccatactgttcagtattctgctggtgctggcgattctgattgtgctgtttaaagattttctccagccggtcaccattctcgccgccctgccgttttctgtcggcggcgcgattatcgctctcgtactgtatggggcaatgatcgatctgccggtgattatcggcattctgatgctgatgggcattgtgacaaaaaactccattctgctggtggaatttatcctggaaaaagagcgcgccgggctcagccgtgaacaggcggtaaaagacgcgggacgcgagcggatccgcccgataattatgaccacatttgccatgattgccggcatgatcccgctggtactgacgtccggcgcagatgcggggttccgcgcgccgatggcgattgcggttatcggcgggctgataagctccactattctcagtctgttgtttgtaccagtgatttacacctttatcgatgatctgaaaaaagcattattaccacgtctggcaaaactgacctccgtcaccaaagccgaccgggatgtgaaggagtggtaaagtcccgctgcgaacaataagtaatttactggttgttcgcagctttaacacagtaaaaccaggaatataaagtttatccctgattataacgaccccggaataaggtttccccctctgcaccattactgtcaagggcaaccaaacgtacttctgtgcggatatttttacctacggattcaaaacggatatgaatcggctcaaggttaattgatgcggtggtaaaggtatcctcatagtacaatttatacccggcagcaaaggcagtgaggtcacctttacgaaacatgatacaggtagatgtgctgccgtgaaaaataacaaaaccttgtaatggtttattttcgccgtctttttcaaaaattgtgaccggctgactgcggtcattcagcccggataaaaccacaccgtcatattcacccattttaaccgtcaggccgatcgcattattggcggaatcaacaggtaaatccgtatattttttgccgccgatgacagcctgataattattataacgggtaacactgccttcttcgaacacaacccgggtttgtgttccggaattgtctattttgccgccgaatggtttaatttcggttccttccagataaacggtctcactggcttcagaaccccgcgaaccatatatcccgatccggctgttccatacgatatcctcttctgccggaaccagaattatattttcgctgtcaatctgttcaggtgactgccaggtaataccttcaataacaatatcatactggtcataatagctcagtttcccttccggaaattttatccctttacgccataccccattgtactgataatccgtcaaatatccgttacgcggtttttcagaatttgctgtggtcattcttatttctccgaagtattccggcaatatgtccgggcttcttttttacatcagaataaggtacaggacagttctataatttaaccacggggtatccggaatgcatcaggccggataatgttctgatatcaggtaataaaaaacgggtttgccccttccggaggcaaacccgctgttaacgcgctgataccattacggacgaacagctgtcacttcgatctctacacgccatgccgggtttgctaatttagaaacctgaacagtggtacgcgccggtaatatgttaccggaatctttgtcgttgtaatatttggagtaaccggccataaagcccgcgaaatccatattaccgtcagtctcttcgccgccgaccaggaatacctgcattttcaccacatccttcatttccagacctaagccagccaggtgcgccttgatctgttccatgatattgatggtctgtgcttcagtattgccgtatgacgccagaacaccttccggtgcgtctttggaaattttggtcggtactttaccgctgaggaaaataatatttttgctgctgctgatttccacagattcagagataggcataccgttcagtttatgatgaacaacaccttctgacgcgtgagccgcgccccagaccagcggaagagctaacagtaaacttttgtaacgcatattaagcctcttaatagtatcaacgtaagtaatcagaaaattaactaaaacgtgaaagactaaacggagccgggtcaataaccggttttttaccggtcacgatatccgcagtgatttcaccggatgccggaccttctgtcataccccagacagtcgcggtgttgatcaccagacccggatactctttcacttcagaaataatcggcagttcgtcgtaggttggtgcaacaaccgcgccccagcgttcaacgactttcgattgttcaaatacagggaattccgctttcatgcgggcaaataccgcatccaggtgttcggtattctgtgtggcggttgcgatgcggtaagtctcgaacggtgtgacttcatcgaggttccaggatgttgccattttgaaggagttgaacaaatcttcaccgatggagaattccagcggcagctcaccgccgcccagcagatgcaggaatttcggccccagcaggaagctgtctttcaccacagagctggtgaagatacgcggtgccacggcatatgtgccgtctgcctgctcgcggaagtgaatgccgctcggcagatgcacgttaccgcgtggtgcgcccggaacgccggaaacacgctgttgtgacagatagacgttcagtgtcgggatatcaatgcccagattacccataaacaggcgtgaccagataccgccggtcaggaccacatgagaggttttgattgcacccttctctgtgaccacatcagagactttaccaccggcagtttcgataccacggaccgcgcagttagtgtagattttaacacccagggatttggcatactgcgccagaaccggtacaccggtttccgggtcaacactgcctgaatcttcttcaaaaccggcgatcggccagtctgttttggcatcaaccaggcgttttttcagttcgtcgccctgaatgaaacgggtgttgagcggtgcttcaaaatcagcggcccactctttggcattctcaacccaggcctgtgattttgcgagatcttctgcgcttgacggtacctcaacacggccctgggtacgatagctggtatccgccccgattttttcattcataccgcgccataacattttgccgtaatggtgcagcgggaatatttcttttgatgttttgtagctgatgatctggctgtaagcacgtccggactgctcaccggcgatttcacctttttccaggacggtgacgctcatgcctctttccgccaggttaatcgctgtcatgatccccatcatgccgccgccgataatgactgcatcggactctttcggtaatgcaccttcggtgccgtcaacatgttttgcgcgtgaagtcgattccacaaatttgccgtcgcggcgaaccataggaactaatactgaagcaccacctgccagtacgccggcagcaccaacccctaaaattaactttctgcgtgagattttcatctaaagcctcatcattatctgtaatatttgtgtggcatttttttaattaagtagcacactaattataacaactatcattataatgttaatgaatatagtgtgatgttaataataacgagacttaaggtaatctttatcaggaattgccgatataaagtatcggatttgacgaggtgatgaacaggattcaggccggatcgtctgcggtaaatccagcggtaaatatcataaacccttgttattatagtggataaggctaaatagtgagcttttttaagaagttgttacatcagggataaaaataaaacgccggataccacagcagcacccggcgttttataaagatattaacaataagggaaagatcaggcggatggcgtacgttttctgagctgcagaaaccatttatccagttcattggcaaacaactggcgatcacgctggttcagtgccgccggaccgccggtctggatgccggaagcccgcatagtgtccataaaatcacgcatggtcaggcgctcacggatagtcgccggggtataacgttcgccgcgcgggttcagtgcgaccgcgcccttctccagcacttcagcggccagcggaatatcagcggtgacgacaagatcatctttctgcacacggcggacaatctcattatcggccacatcaaacccggcagagacctgcaatgtttttaaaaacggtgacggcggtaccaccagccgctgattggccacaaaggtgacttctgttttttcccgatccgctgcccggtaaaggatctctttgataactttcggacaggcatccgcatccacccaaatcgccactgtttactttcctctgtactgcaaaatttaatccgcgatcataacgcattaacgctttctgataacctgaaaaagtgccgccagagcaacaaaaccggcaaaaaatgagatagaaaacgacaattcataaaagacaaaacgatttatatgaacaccggttgctgtctgcgccagacggtacgccagcggcgccgtacacagtgccgccagaactgccagacacaccggcagtccggtataaaaccagctggtaaaatggtgcgcctcatccgctgcgcggtacatcccggaagagtacagcaaatccggcgatacactgcccgtaatgagcgcgggcagattcagccaccgcccgtaacgggattgtttcaggggaaaaacaatcgccggatgtgcaaaagtccatggcatatatacttatcctgctccggaaaaccggaaataaattcatttttgtgctaataaatagccggtcacaacaattaataacacaccgaactccgggcaataacctgtaaaggcagaaaaatgaaaaagcatcttaccgggatgatcgtaaccgggctgttatcagcccccgcgctggctcaggagtttacctgtcagctggaaaataataaatatgtcagtgtggtggtggaaaaaggtaaaacgccggcataccgctacgggacgctggcaaagccggaaattaccctgccggtaaaaggcaatgcgaaaaatggtgtttatgtcggacaaaccatgtttagcggcggtggttcggcgtatatccgctttgaaaacggcccgtttaactatgtggtatacagcggaatgggccgcggctgggaatttaccggcctggcagtctataaaggcgataaagtcatcaataaaaaggtctgtaaaaccgatttggggatctatgatgttctgaattacggactaccggaagatgaatccggtgaaatctatgccatggatccgaactcacaataatatgtactgcggtggcctgccgggttaccgccctttttttatacatctgtgcctcgccgcccatctgtggcataatgcccgccgtttattttctcctttaacttatgagtattcgtcttgttaatcagcaacaatattacgatgcagttcggcgccaagccgctgtttgaaaatatctctgtcaaattcggcggcggtaaccgctatggcctgatcggcgcaaacggcagcggtaaatccacgtttatgaaaattctcggcggtgatctggcgccaagcagcggcaacgtgtttctcgacccgaacgaacgtctgggtaaactgaaacaggatcagttcgcctatgaagaattttctgtgctcgacacagtcattatgggtcacaccgaactgtgggaagtcaaacaggagcgtgaccgcatctacagcctgccggacatgagcgaagaagacggtatgcgcgtggcggatctcgaagtgcagtttgctgaaatggacggctacaccgtggaatcccgcgccggtgaattactgctgggtgtggggatcccgctggaacagcataacggcccgatgagtgaaatcgcacccggctggaaactgcgtgtgctgctggcacaggcgttgtttgcggacccggatattctgctgctcgacgaaccgaccaacaacctggatatcgacaccatccgctggctggagcagacgctgaatgcgcgcaacagcaccatgatcatcatttcccatgaccgccacttcctgaatatggtgtgcacgcacatggccgatctggactacggcagcctgaatgtgcatccgggcaactacgatgaatatatgtttgccgccactcaggcgcgcgaacgtctgttagcggataacgcgaagaagaaagcacaaatcagtgaattgcagtcatttgtcagccgtttcagcgcaaatgcctccaagtcccgtcaggcgacttcccgcgccaaacagattgaaaaaattcagctgaccgagattaaagcgtccagccgtcagaacccgtttatccgttttgagcaggataaaaaattattccgtaatgcgctggaagtggaaaacctgtccaaaggttatgacggtaacgccccgctgttcaaaaacgtcaatatgatgatggaagtgggtgaaaaagtcgcggttctgggtatgaacggtgtgggtaaatccaccttcctgaaaaccctggtcggtgagctgacaccggataccggtcgttataagtggtctgaaaacgccaatatcggttactacgcgcaggatcacgccaccgattttgaagttgatatgacggtttttgactggatgagcctgtggatgcagccgggtgatgatgagcaatcagtccgtagtgtattgggccgcctgctgttctcccaggatgacattaaaaaatccgtacaggtgttatccgggggtgaaaaaggccggatgttatttggtaagttaatgatgaccaaaccaaacattctgattatggatgaaccgaccaaccacctcgacatggaatccattgaatccctgaatatggcgctggagttatatcagggaacattagtgtttgtttcccatgaccgtgagttcgtcagttccctggcgacccgcatcatcgaaatcacaccggagaaagtcactgactttaccggcagttacgatgagtacctgcgcagccgcggtattgaatcagaaaacaactgatttccgttctgccaataagaaaagccccgtttcagagccatgaaacggggctttttgttttcgtcagacccggcgggggcggttgccggcatatctgacatttttcagaaaccagttcccgcatacctctgtcctgtaccggaaactgataggaagaatatctgtattcgggtagaatgtgcttgctaatcagaccctgatttaccttatttgagggagaaaatcatcaatggacagctttgacaggaagattctttctgaattacaactcgacgggcgattaactgtcactgagctggcagatcgcgtgggtctgagtttatccccctgccaccggcggctgaaagcactggagcaatccggagctatctgcgattaccgcgcacagcttgatccgcgcgtgctggggctgaatttttccgcactggtgtttgtcactatgaaagacggcaaccaggaaagtatgagcaaatttgagacagcggtggcggatattccgcagattatcgaagccaaacggctgtttggcgatccggactatatgctgaccgttgtggtcaaagatatcgatgcctttcagaaattatatgacagccgcctggccgccatgccgggggttcagcgcctgacctccaccctggtaatgaaagatgtgatcccggcgcgggaactgcccctgttgtaacaaaaaagccggcaatatctgccggcaagcaacacagtactgaatcttttatgccgggctggctaatttcatcatcaccagcccggagataattaatacccctgcgataatccgcatcatgtttgccggttctcccagcaccacaatcccgacgataaaggcaccgatagcgccaatcccggtccagatggtgtaagccgtccccagcggcagtgcccgcatggccattgccagcagcccgaagcttatcagcatggcaataatggtgatcactgacggccccagtttggtgaaaccctctgattgtttcatggtaaatgcccagacgacttcaaataatccggcagtaattaataaaatccacggcatggtacatcctcactgatttctggttgcaggtgaaacgtttataagttacctttggtatagttatatgttacctttggtaacttgtaaacacctttccgatcttttttcgatcttttctgccagctgaccgcgaccgggaactctgtgatacactttccggcagacagaacgactttaatatcaatgaggaggcagatttgtccggacgtttacagcgcgacgagcgccagatacagctgctcaatgtcgccaacagcattatcctggcggaaggcaccgatgccctgaccctcattacccttgcggaaaaggcgggcgtgaccaagccggtaacctacaaacatttcggcaaccgcaagtctttgctgcacgcgctgtttaaatacagtgatgatgttctgactgaacggatgaataccgggatggaacagccgatagcggacctcgatcaggccgtttctgtctttatcacgacctattttgatgtgatggcggatgacggggaagccttcaatgccaccgtggcggcactgaaagcctatcctgaatatgcggggatcagccgcgaagtgcaggattttttctgccagatcctgcaacgtgcactgcagcgctggctgccggataatttccggatcccggaatggacttctgtgatgattttcggtgcaaccgagtcactgtgcctgatgatgtttgctgacccggcgctgaaagcaaaagtctgtgaagaagccatctggctggtcaaaaccctgctggccgaccagcttaagcggttcaccggccgctgatgaccagcccttcttcttctgacggataactgaagtgtgcagtaatcagatcaaactgctccgctgaggtggcaaacgggttttccccgctcagattccttgcggccaggcgccgtttacactcttcatcactcacattcagcacatgacagcaatagctgcatccggcctgctctgccagtcctttcagccactggcgttgttccggggtattcgccggaaaatccagtaccagtgttattcctttttgtaataacgtcaccagatgcagctccagggcggatttcagcagacggcttttttcaatataatcagccagctgtgtgatttgtcccggatacagtgccgccagccaggtatcttcagacagcagaacggcctgttgtccgcggactaattgttgtgccagtgtcgatttccctgaggcgattttgccgcagaggaaatgcagtgtggcggaagattgtgtttctgacatgattgctccctgtctgttatgccgctgagagagcaataaaaaacccgctcaggcggcgggttctgaatacagcacatcccccgctatggtgcggagataataatcatgccggatgcgctgtataaattcatggtattaaccttattgaaataatcatcatttcagtgattctgttttagcagagtctgccgcggatgtcaggcagtttttttcggccgtttaatacttatcaccgccagtgccagcacaatcatcacgatccctgccgtttctgtgctgcccggctcctcacccagcagccaccatgagaacagcacaccgcagaccggcaccgccagtgtgctcagactggcaatccccgccggtaattttctcagcacaaacagccataaactccaggcaacggcggtcgccagaatagcgctgtaactcagtgcccagaagacatagggctgccagtcaatcgtgcgctgcggtaccagcagcgccaccacggtcataataattgcggcatacaccatctgccaggtggtgagagagagtaaatccacctgcggatagcggctgtagagttttttcgccacaatcgcgctcgccccccagctgataccggatgccacggccagaaaggcacttttcatagaggcgaaatcgagcgtccagggctggatcacacacaatagccctgcaccggcaactgaaatagccgcatactggaggcggcgcatccgctcaccgagcaatactgctgccataatcaccacccagaacggcatggtataactgaggatcgccaccttccccgcaccgccgctgaccagcgcccattgtgccagcccgaccataccgcaggtctgaaggacggctatccccagcgtgtagcggaatggcgtaaagcggattttccgccccatcgcgcgttcgcggatatacagcaccagtaataacataatggcgctgaatacacagcgcatcgccgtaaagtcaaacgcaccaatatagtgcgtgacctgcttcatagcgatccagctgtaactccagatcagtgttaaaatgaccaggccggtaatggcgatggcattgtctttttcccgtaaagccataatatcctgtgaccacttcacggcagtacccgtctgtaccccgcgtgcggctcctgtttttatagtaccataaccggaataatatgccggatgcccgcagacggactgacctcatgcaatctgcatttctgccagtttacacccggtttgaaagaagggaaaagatctgcgctcattaataccagaaggaagaacgggtgttaagtatgacgcaatttttccccggcattttccctgttgtaatgctgtctgaacctgaatgaatataagcctgccgggtataaccccacagcctcactcaagcatcacaatactatcaattttccactgtccgttttgctgaatcagttttacccggaatgaccgcagcggctccggtgctttacccagtgtgatgcgcactgtggcagtatccggggtttgtgattcagtatgtgccgcgcgctctgtcatccacgaatccgggtaatcctgtgacttggtgtaataattgacatcattttccacccaatgctctccccacagacagatataactatattcggtttctttgcagggacgcggctggtcgcagaacgcctgatcagtgcccggaccatcgaaattacaactgagggattcactgatgctttcctgcaacgccggactgacatacaaatcctggctttttgcataaccatcagaaggcggatcctgcaaattgagacggtagaaatccaataccacattttccggtgataattgtgcagcaaccgctgataacggcaatagcagagacaaaatcagcgggaggtattttgttgttttcatgataatttttcgtcacataaagcccgcagagaaagaatgcaacagctgattgcctgtttatcagaaaccggaaatgattcaccggtcagatagctatgctttgctgcctgcaacagttgctgcagttgcggatcggaaattgattcagccagccacgccgcagcgtctgctttggatgcaatgtgccaggttgtcagagtataagcaatgcgcgacaaagccagaatgatattgcactcatcattttcccaatcctccggtgtgttccattgtgcaagtgtcgcggaaaatgcccgtttcagatcggtctgcggaacggcgtcaaatatcactgccgcatcaccattaagtaacggcatattatgcaacctggctgcggatagtaaccgggacatgattcaggttgattttcatcagcaaatgctattcatagagtgcatacaactgctctgccagcggtaatggtaaaccgtcatcataagcctcatcatccaaatcaacatacacatcaccgggtgcggcgatcagcatggtgtcaggcacaggccgcctgaccggcaggtccgggtagtcatccggccgtccgccttctgactgcatcgggtcaaaccagataccatgatcggcataaaaccccgcagaatagcgggtttcaattaaccggatcaatgccagtgtttgccgtgaatagtccggtacatcatcatcatggccatactgcacataccaggcagcacccaaagaccagtacatcagcagtgcggatgcccgatccagttgcggatccgccgccagttcgttcagtgcatcataattactgtcataattagaccgggcgataaacaagtgccgctgttccggcgttgcatttgtcagaaaatcacggattaactgtgcttctttctgttctttttcttcgtccgtcatgccattctccccgacaacgccagatgctgtaacaacataatcgttttgccatcatttatttcaccgcttttgatcgctgcgagagcctgcgggaacggcatttccagcacttccacatcttcgccctcttccggcagaccgccaccggccgtctgccggttattgtcttcgtattcggcaataaaaaaataaagtttctcggtgacagctcccgggctcataaaggcttcaaagactttttcaacatcggtaatgcgaaaaccagtctcttcctctgcttccgctttgatgcgggataccggatcctgctcttccagcagaccggcggccgcttcaatcagaaagccgtcatggccgttgacatacaccggcaaacggaactgacggatcagaatgacgctgtttttctggcggttatacagcagaataaccgcaccgttaccgcggtcatagacctcccgctccagacgctggcgggtgccgtcgcggcgcagataatcaacgacatattttttgaggatataccagttatcggaaagcgtgatggtatcaataatacggacagtgctctgttcggaagtcatagttcaccggatgtcagcaaaattgcgggtttgcagaacactctaatcgctttatccgcctccggcaatggcaaaactgccagcattatttgcaggcatattaatgctgacgatataatctgccgcagataatccacaaacaaggcgggttgcatgagtgacactcaggcactgagttacagcgaattacacacaatatctgatgcagatatcgcacaaattaatgaattaattatcaccacctgggattaccgtagttggatcccgaaagagaaagttctgccgatggcggaatttttgctggatgatgtcattctgacctcatcacgaatttttgtggtgcgggatggcgataccatcgccggtattatggcggtcacggtatctgccgatttgcgggagaaagtccacgccaaaacccgtcagtattctgccctgaaaaatattatcgcccgtgacccgcaggaagaaaccctgtttgatatgtatctgaatacgctgattatcaacggaaatctgctggcttcctgtgacgggaatttcgatgcctctctgaatttgtttatgatagatgcccgcttccgcggacacggtatcggtaaccggctctggcagctggcgatggattatctgcgggaaaaacaatccgcccgttatttcctctggacagacagtgattccgatttcggtttttatgaacacaaaggattacagcgtatcgccgcgcaagcctatgactggggcggccatgacgtgactgaaacctattatgtttatgccggggaactccctgctctgtcctgatgcatccagctgtcccacggcgggtcaagcggcagcttatccgccaggaaatcaataaaggtgcggattttcggggcatgggtgtgcgccgggctgtaaagtgcatagagcgcgaacggcgtggttttcggattgtaatccagtaataccggcaataattcaccgttatcaatatagtttcccagcatataggtcggcaggcagacaatcccctgatgacagcgcgccgcctccagtaatcccaggctgctgttgacctcaatcatattgttgatcgccagcggataggctacaccgtctttatcattcatccgccaggtgtccgggatattcggattaattaaacaattgtgccgggcaatatccgccggtgactgcgggatcccgttttgttcaaaataatgacggctgccgcaatagatccaatttatattgcatagtttccgtaatgcaaaattttccggcggatgactggtaatacgcaatgcaatatcaaagtcagtttcatttaaattaattaatgcatcgttcagatcaacggataagctgacctgcggatttatttcccggtattcgctgtaaagccgcattaaatggcagacgccgaaggcaattgaacaggttatttttagctgtccctgtgcatgctgataaaaactcgccgtattcactaatgagtcatcgagatctgtcagtaactgttgcgccctctgcaataaataacgtccggcttcagtcaggataaaattgcgggtggttcgtttcagcagaaccacaccgagctgctcttccagctgctgtaagccacggctgacagacgacggtgttacattgagttttcgtgccgcaccgctgaaactgttgcactccacaattttgataaacagctccagatggcgaaaaatcgcgtagctgtcaatttttgctttaaacgcaaaagtgtttttatttattagcatagtcgtaccctgttcagcctgcgtgttaccctttactataacaatggctttataacactgtatccatacaacataaatatattcacgttgttcctgactttttaaataattaaatctataacgttgaggaattgactatgcaagacagcattcagacaggtgcaaatgcaaatagtgatttaaaaaagataccctttaccaaatatgatgccgggtgggttgtattatgtatcgggatggcgatcggttccgggattgtttttatgccggttcagattggtattaaaggcatctgggtatttattgccgccacattattgtcatatccggcgatttactggctgcagaatttatatctgaggacattatcagaatcggaagaatgtgaagactatgccagcgttatcacgcagtatctggggaaaaactggggggttgcccttggtatcgcctatttcctgatgctgctgcacggcatgttttcctattcactcgccgtgacctttgacagtgcctcctacatcaaaacattcggtttaacggaaggactgttatccgattcggtgtggtacgggctgattatcctgacagttctggtggctatcgccgcacagggggagcgcctgttatttaaagtctccggcccgatggtaatagtgaaattcgggattatcgtattactcgggattgtaatggtgccttactggaactttgccaatatcagcgcgttcccggacttcctgccgttcctgcgggatgtgtttctgacactgccgtttaccctgttctccattctgttcgtgcagattttaagcccgatgaacattgcctaccgcagactggaaaaagacaagcgtgtcgcaacttaccgcgcggtacgggcaaaccgggtggcgtatattattctggccgttgctgttctgttctttgccttctcgtttacgttctcgataagccacgaccaggccgtctcagcgtttgagcagaatatctcggcactggcaattgccgcacaggtaattccgggctccgttgttaaagtcatgaccgcaatgctgaatattttcgcgattctgaccgcgtttctcggtatttatctgggtttccaggaagcgattaaaggtattgtggtgaatatcctgacccgctttatgccgcaggagcgcattaatcagaccgtactgcattacggtgtatgtatcggggtgatcctgtccctgtggttctgggtctccacccgcttctcaattctgttctttatgcagctcggcgggccgttattcggcgtggtttcctgcctgatcccgtgctatctggtttaccgcgtgccggtcttacataaattcaaaggtgcaacagtctggtttattatcttcttcggcgtgctgttgtgtctctctccgttctttaagtttttcgaataacgctgtaaatgaataatgacgtattacgcgtgaggatgttatgactaaaaaaaccgtttcagattttcatattgatacacagataacgcagctgggacgcgacccggcgtctcagtccggttttgttaatgctccggtttaccggggatctaccgtggttttcccgactatggatgccctgctcaataaccgggctgagtttaactacggcactgcgggcacgccgaccattaagaacctcgagcaatcctggagcgcccttgcgggcgccgaaggaaccgtgctgtcaccatccgggctgggcgccattgtgctggcgctgctgaccacactgaaaagcggcgataacctgctgatgccggacagtgtttatcgtccgacccgcaatttctgccgtggtctgctggaaaaaatggggatcaccatcacctattacgacccgatgatcggcggtgacattgaatctctgataaaaagcaacaccagcacgatttttctggagtccccgggatcgcagagctttgaggttcaggatgttccggccattacggcagtggcgaaaaaatacaatatcgcgacgattattgataatacctgggcaaccccgctgtttttccgggcgcatgatatgggctgcgacctctcccttgaggccggtaccaaatatctgggcggtcattccgatctgctgatgggaattgtctccgccaacgcggaatggtggccgaaactgcgggaaacctatgatctgatggcaatgctgccgggcgcggaagattgcttcctggcactgcgcgggctgcgtaccctgtcaatccgcctgaaagaagcgcagtcacgggcgctggatattgcacactggctgaaatcgcgtccggaagtgatccgcgtgctgcatccggcctttgaagactgcccggggcacgagatctggaaacgtgacttcaccggctcttccggcctgttctcagtggtcctggatccgaaatttacacaggatgacgtcggcaggttactggacggcctctccatcttcggcatgggttattcctggggcggttttgaaagcctgatcacgccgtttgattgcgcggaataccgcaccgtcacacagtggaatccgggcggacggacactgcgcctgcaaatcgggctggaagatgttgatgacctgaagcgtgatttggcggatggatttgcgcgtatggcgcattgatattccgccggaaaaaagcaatagtaaggtataccgaaaaacctgcattttgcaggttttttgttgattccattcaacaaatgcccttgcgacgaacttaccttaccgatattttcggacttatcatctatatgatcctcgcctggctcagtctgaattttttcagtatcagtgaatataaccagaatccgggcaaaaaaatgccgcactgaatgcggcaattaagtcatgagggtattatattaatactacataacattgataagccagccagccgagtacggcacctgccggtaaatcaataatataatgctgtttggtgaacatgcaggataaggcgattaacagcgggaacatgaatacccatggtccgagagtggcataggccagcagcgcggttaatgtggcaacagagacgtgcatgctcgggaaacagttggatgtatcgtcgaatttctgcacaaacagcaggaatttttcggacgctttcttcccggtattcatttcacgccagtgcggcggcgtggcaaccggatacaccacaaagaaaaacatctgcatcagtaacaggataacatagctgaatacgatgatgataaactgacgtgaatcctgaataatccagttcagatagagaatcgccggataataaagaaagctgtagatccaggaccaccagggccagaaaggaattttttcatccagtgcagagttaaatgttttaaccggcctgaccatatgacgttgcgtaaagaaataaaactgatagacacctacgataataataccactgagcaccaggtgaataaccctgtcgataaacatcatctgaaaatttccttttaaaaaaaatcaattaaactgcttttctgattttcagcacacagtgttttagcataccagggcacgaaatactatcgtgtcattttatgttgaattgtaaaatcagaataatatcaaggtactacagtcatttaccacaacaaggaaaattcctaatttttcagcaaaatagtgtcactctattgatttgacggataatattttataaacccttcaggttccggtttaatttatccggcaggctgttttaaaagcgtaaaaccagcaggtaactatttatgtcagcaatgccggatattccgcgtaccgctatcatttttctgcttcccgggattcagaaacagaactgaatgtttacccggtcagtgaatatcacccgcaggttatggaaaaacctctgtaatagcgtttctcataaatctgataaaaatgagtctgttaccggcagataagcagccataaactgatttccccttatctgtttattatctgccggagaaacattatgactcagacttctgcctttcaccttgccgcagaaagtacccagccacagttgcatatgctgacgttacaggcactgaatatgatcccgcccgcctctttcgccgtacctgccgcttcaccgcagggaattaccaccaccattctcagcatggtgctgaaactggtttataaaaaaatgacagagccaaaggaagtggatgttattggtattattcaggaaacactgatgaaaaatacctctgaatggctggaatcagaatatcaggccgtccgcaaagatgccgaaagcctgcaggatgctatcagctcctggcagaattcaccgacagaagaggcgcgccagctgattgtggtacgcaataagattgccatcgcaagtatgagccgcttatgcattctcagcatcaataccgcaaaaagaataggtattgtccggctgtgcggcgtgtgtgccctgtcctgcctgctctatttctttacactgcgcgataccctggtattcggcaagagttggggctatgcctctgatatgctggaaaaatacagcaaaactctgacggaacaggcggatattatgtttaaagacgtgctgactgcagaaatcaataattacaccgaaaatgatgatttttatgatccggaaagccaggccaaacgctccgttatttactggacatccgggtacaccaatattcaggatcatctgacttacggcgcgcaacaaaaatccaccagggtctgttctgaacgcagcgatatcgctgccaatccggttaatgctgaaaaccatatggtttatctcggcaatctgttcctgaccgccggaaattcttctgctaacggcagctacaattatttatccgccgccaaaccccgcagttatgacagagtcggagacccggtcacactgccggtcagaagcgccgggcagtaccatatccgcctgtactatgcctatatgaccaattcccttagtttcgattatgaaactcagttgcggattgaacaggccggaaaaattgttaccgatacccatctgacagatttaaccaaaacggtgctgacaccgtataaatccgggtcaaattacggcccggtcatttaccgggagacccgggtgaaccttgaggaaggcgatattgtgctgacattacatgaggaccgttccctttccggcggcgggttgctgcagcatattgaatttgtgaaagtataaaagaggtacaatgccgtcaccggaaaccggcgacggcatatccggatcactccggttgcagaatatccgtgatctgctgcggtgtcagcgtaatcccataaaacgtctgataaaacgtggctgtttcatttctcatatcaatatccgcaaaggcgtccgggtacagcactgtagccagccagagaaactgcaatgcctcctctgacgtttcgcggcaccaccagaacataccacgcggattggtatagatccgcccgttacgcacggcatcaattgactgccattgcggcgattgctgaataaattccgcatcccgccggttcatcgcaataatcacctgcggatcagccgcgataatctgctctgatgatacctctccgttcgcgctgctgtgtgcagggaaccaatttcccgccacattgaccgcgccggccagatccatccagtcctgattgagcgacggccgcccggaggtatacagtggatttcccatactgtgatacacccgcagacgggcagacgccggaacatttttcagtcgttcctgcacccggcggatattgtcacggaaatagcgctcatattgcgccgccttctctgccgcatccgggccaagcgcctcgccggtcagttttacccgctcccgcagggcatccatactgttagccttaaaagccagcacacgaacaccggcctgtgtcagtacctcctgctgcggaacgcggatcccgtcatgaataaataaaatatctgtcctcagactcagaatttgttcaatattcagctcatttccgccggttgtgccgatgaccggtacattatcaatctgcggcagcatctgacggaacagcgggatctgtttggcaacccgcgaggttccggtgatattactgccgtaacccagcatcataataatcgcattctgcgccggccacggtgttgctatccgcagtgccggctccggcggggtttctgccggggcactgaagacacaggtactgacaaataacaggcataacgctgataaatagtgccgcatcacgctgcctccgtgctaaaaatcaaatgatacggtagcccggaattcacggcctgcaccggtaaaggcattggcgccgccatttttaccgttactgttgccggggaaaatagacgcccagtaatgctcgttggtaacgttatccgcagagatccgcagtgtgaccggtacattttctatctgagtggtatagcgggcaccgagatccagtgtggtgtagctgtccgcccagctggtgttggtatcatttgctgcccgtttgccggtgtaatgaatattggcactgtatacccactgcggaacagatggcaggctgtattccatcagcaggtttgcctgtactttcggcacccctacaacccgtttatcctcagtcttactgtttccggtatccttcagttctgctttcaggaacgtgacaccgctgtagatattcagcccctgccagacattgccggtggcagtcagttccagcccgtcatttacctgttcgccctgttttttaaagatctggtcgctatcggtataagcaaacggccgtttgaggcggaaaactgcggcactcaggttcatattgccggtattggctttaataccccattcatattgtgtactgcggtacgggctgagtgtttcaccccggtttttgactttatcatcatccggcgcggtatccccgggctggagagaatcggcataactgatataggtcatcacatccggagtgattttgtacatcagcgccatattcgggctggtaccggtctgctgatcacggtcagttttgtgtccctgcttatcgaagttacgggtcgtgatccagctctgactgacatacaccatggcagaccattgtgggttaaacgtgacagtgtcaccaatgataatactctgctgctggttttcactggctttgtaacgttccccgccggttctgatgcggccatcggaaggttcggtcatggaagacgggtcatacatattggtattgccgagctgaaaggttttaccccgctctttggcactgtaaattgaccaggtataaccggtggtggcgagagcaacatcatggtttacggagccggtatcaaactgaccgttcagggcgagattgttactcagcacacggaaacgaccggctgccggagaatccgtgattgaacggctgatagtccctttgctgtccagaatttgcgacgaaacagagcgcattgcccgatctgcctgctgatagccgataccgccgctcagtgaccagtcatcattcatatagtgggtaaaacgggtactgacggaatctgtcgtcaggtcattaccggcggtattgagtgcaaggtcagggttggagctgtccggcgcattcggtaaatcaatatccgggccgtaaccaaagctgccgggaaatcctttggtcacaaaatgatagtgactggcatccagctgtatctgtgttcccggccggatctgccagtccagggcaacagcggccagctgacggcggattttactgttccggacataaccttcaccctcttcatccagtaaattcaggcggtagccgaaagtcttctcttcatccacctgaccgccaagatccagatgtgcactgtaagcattacggttctgatatcctaccgtcacccggtgcagcggatcctgagtcggccgtttagagataaaattaaactgaccggaagggctggccgggccgtaaattgcaccggtcaggctgttcacggcatccagccgctccagcatttccaccggaaacgcggtggtggagacaatattcaggccgttcagtctgctgttttccaccacactaccctgcattccccggctctgcggacggcccacatccatgccgccgcgggcctgcatctgagaagacggcagatatttcagcatttcactgacacttttactttgctgattacggatcatcgcttcgctgaccgtattgctgctgtagggaatatccagccactggcgggtaccaagcggccccatatcaatatcggtcgccacaaaaccggccccggcctgagtttgcggggtgatatgagaaggcttgtccgtcacaattatggtatctgccagtgcctgctgcgccggaaaaagggcaacagaaatcagcgcaggcagcagtgcccgcgaaatatagttagtcgtcatagaaccatccgttatcgttttactgttatcgttatatatttatatatataacgtaaatgatattgattttcgcttcgggtaaacgtgatcggtatcaatgagttccggaagagataatttctctcgttattattactttttgcaatatatcgcgctgagaatgcaccacgtcagtgccgtagcgcaaaataatagcgcggtaactgcgggtaataatatctgactatcctgatgtgctgcggccaccggtaataaaataaagatgctcagattattcatgctttctgacaatgccagagcctctcctttacgtattccggcatgctcagcaatgatggctgtactgacgggagcggcaattcccagagcgcatccctgcaataacatccacaacatcatcccaggaagcccgcctgttccgctgataaatccggcaatcatcacactcatcactatcaggctgatgagcagcagccgggtatctgtaccgcttaaacgccggagcagcggcatcagaagattcccggtcagtaatccgccaccgaatattgcactgataagccctatcgtttctgtattcagcccgaaccggtcacgcagcaattcaccactgagaacaaacataaccactgcagtaccgttccacagaccttttgccgtgatcagccccgataatgcccgtgaataacatttaccgggccggattgacggttgagaggaagtccggctgacaccgcgaaacacaaaacaacaggctatccacatgaccagacttccggcggcagtcagcagaaaaggtgcataccagccgcagcggactgtcagccatccggcaatcaccgggccggagataataccggcggtcatacccgtcatcaccagtcccatcgcggaagcctgtctgtcatgcggaaattgttctgcaatcagtgcaaaaacagatgggatcagcgcagcagaggccagaccgcccagaatacgcaagcccacagccacactgaaacacggtgccagtgccagtgccagtgcgataccatctgccacaaacaacaataatgcggcacgcaacatccggtaacggccgatacggtctgataatcgtcccagcatcggtgcggcgagcgcatacgataaggtatacaccgcaatcagccatgaggcttgcgcgggtgtgacatcagatgcagccgccagcggcgtgagcatcggtgaaaccataaattcagtaacgccggtaaaaaataccgtgaatgccagtaccggcaatgtataaggtgaaatcataaaaatcctgtataacgaaatgaaaataaacgggttacggattgaattcactcatcaggggaagataaaacagacgaaatgacaggcggcagacagagggtgcactgcagataaacagcagcatattcagaggataaataagagggatgtgaaacagagcggaaaatacagaaggtaaaaatacgaaaccggcagaggataccggcgggtatggtatcaggaataccggctgccggaaacccggcagcatcagtggcaactataatcagttctgtttttgctgccagaaatcatacagtgacggttcaccttccggtttttgctgtgtaaaagagaagccgggctgttcatgcggatctgcccgtaaagcctgtgcgatggatgctgttgataaaccgtaaggttccgcatctgcattggaataagcatagacggcacgggtcacacctgccatccgcattgcggcaagacacatcgggcatggctgtccgctggcatacaccacacaatcttccagccgggtctgccggaggtgattaccggcatggcgcagagccagcaattccgcatgggcggtagggtcatgcagctcaagcatctgattaaccccttcaccgacaatttccccgtttctgaccacaacggcaccaaacgggcgaccgcccttttcgacattccggcgggccagtgctatcgcctgagccagaaattcactatctgtcatcagttattccttatgcttgattaacgggggattcccataccgctttcccctgccattgtgtttccagtgtattgagaaattcgcggactttcggcgccagaaattgttttgacggatataccgcacacacaggttctccgggcggtgtaaatgcagtcagtaccggctgcaatacccctttcgctatctcaggccctgccagaaaagcaccaagctgacagattccgccatcagccagtgcagcatcaagaaccgcgccggtatctcccagactgaaccggccgctgaccggatgcaactgaacgtttttatcccgcataaactgccagggaacatttcgtccccggtggcggaagataagacactcatgtgctgctaactgttccggtgtttcaggtataccgtgccgttccagataacccggtgacgcacaggtcaccaggcgatgcggcgccagaactttacgcaccaggcggctatcatcattaccgccgatacgcacggccacatcaataccttcctgaatcagatcacagtaatcatcagaaaaactgacatcaatatcaacatcgggccattgtgcggcatactgttgtatcaccggcatcacataattgcggccaaaaaccacaggaacagcgacccgcaatgtgccggaaggtttttgtctgccttcatataatgcattttccgcatcatccacctcggataatatccgtttggcatgcagataaaaacattcgccctcttctgtgagacgcaaccgccgtgtggtccggtgaagcaggcgggtactgacacggttttccaggcgctgaaggcattttccggcagcggaacgtgaaatctgtagtttttcagctgctgatgtgaaattaccggtttcactgacccgtacaaaaaccagcacatcgaataagttatccagcagtaaaccatttttatctgccacgatttgtccccggtgtttggccaaagatgatatttatctgtcatactggcgcagatagactctcttctcaagtaaagttattaccatgaggaatgtatgtcagacagtcattgtttatcaccttcattgccgcctgcccgccggggatggttttctgttgttgcgctgaccctcgcaacgtttgccgtggtcaccacagagatgctgccggtcgggttactgacaccggttgcggcagagttccgggtgccacaggcgtatgtcagcctgatgctaaccataccggccctggtcgctgcgctttgttcccccctgattattctgttcaccggccgcctgaaccgtcgttatctgctgatgatactgatgctgttattaatggtggccaatatctgtgcggcaacagccacccacttctctgttctggtcgcggccaggattattgtcgggctgagcatcggcgggatctgggcaatcgccggcggaatagctgtcaggctggtcgattcacggcatgtggcacttgccacttctctgatatttgccggtgttgccgccgcatctgtgctgggaattcccgccggggtgatcctcggtgaatgggtcggctggcgtggcgtgtttggtatcatgagcctgttttccctggcggtgttgctgctgatgctgaatcttccctctctgccgccggttcaggcaccggttgtccgcgattttctgacccaactccgccgcccggtgatcctgacgggcttgctgatcacattactgctggtgactgcccactttatggcatttacctttgtccgcccgcttctgcaacgggatcctcagttgcaggcacatgaactcagcgggttactggcgctgtacggcattgcaggtattgccggtaatttcgtgctggggttattgtccggtcatcatctgttccgtgccgtattctgcattaccggcggtattgccctgagcctgacagggttactcctgctgcctgccgttcctgcatcacacatcattattctcacgctctggggaatggcatacggcggcgtatctgtgacgctgatgaactggatgatccgctacagcgcacaagcgattgaaataaccgggtcactttatatcgcctttttcaacaccggtattgctgccgggtctgctgccggtggcatgatggtgtctgcgttctccttacaggaaaatgtcattgcagcactcatctgtgctgcaatagtgctgatattgatttgcggttttgttatccgcttataccggccgggacgtcaccggcaggccaatctcgatcaggtttaaatccgggtcacggaaatagactgatattatcgggccggttgcccccgtgcgttccaccggcccctcttccacaacaattttttcttttgccagatgcgccagcgtctgttcaaccggggttccggtgagaaagcaaagatctgctgaaccgggtaccggtttatccgcattcggcagaaattcatttcctgcctgatgtaaattaattttctgacggccaaacaccagagccctgcgatccccgcgaaatgtaatgaccgaaaaccccagtacgcggtggtaaaaatcacaggttttttcaatatcggccacagtcagaaccagatggtcaaggtgtgaaattgtaatcatcagacaactccctgtatcgctgttattcgtacattacgtggtatcacattggctgaaaatacacaattcggggtatttgctttttttaatacatccgtaatgatgcactacagacaggaaactatttccggctgccgggcgcgtgttatgcggtaaatcagatatgcggcacacagtgccatcagcacattgaacccgaggctgacactgtaaactgcggccggggcagataacagtacagtatccccgcggtgccggagtgaaaactgtaaaataaccgatactgcggttgcaccggttgccgcaccaatctgttgtaatgtggccgtcagtccggatgccatcccggcctgtgccggtgtaacccgggacagcacaatgttcagcatcggggtcataatcatgccctgtgtgaacccgaccaaaaacagaaacaggctgagtatcgtatttgcggtgctttgcggcaggagattcagcccggcgattaataccagataactggcggcataccctaatgcaccgtaataaatcaccggttcgccccgtccgataatcattcgcggggtaataaaggaggcaataacaaagccgatactggacggtacaaaaatcagcccggcttccagcggtgtagcccccataccgttttgcagtaacagggaaagtatcagcggaaatgcggatgaggtggcatagacacacagcacagcgccggtgccggtaacaaatggccggttgctcagtacggcaatatcaaacagcggcgtttgtccggtgcgtgataaatgctgctgataacggacaaaacagaacaacagaaccatacccgtaaacagcaatccggcactgaaaagtgtcaggccccaaaccggtaacatcagaagcggtaacagaaatgcggtaattccggcagcggataacagtacgcccggccagtcagtggtgagtccgtccgcaacgcgcccctcctgtaaatggcgggacaataccagagccagaataccaacagggagattaaccagaaaaatcagccgccagctcatatcaaacagattcagggtaataagccagccccccagtgcctgaccggcaatcgcggccagccccagcgtcatccccagccagccgaatgcttttcttgcctgtgtttcatcaaaattcaggcgaatacctgcatacacctgcgggaacagtaatgcggcagccagtccctggataaaacgggcaatcaccagtaataaggctgtcggtgcggcagcacacaacagtgacgcgagtgtaaaaaaggccattccggcctgatataaccggcggcgtccgtaaatatcgcccaaccgcccaccggtgatcagcagcaggccgaaagccagttcatacccggcaataatcagtgtcagttcagtgaaactggcctgtaagccgcgttcgatactgactatcgccacattgacgacaaacagatcaaaaatagtgacaaacccggcgaggactaatacaaacagtgcaatacgttgctgctgattcatgtttttctcattttgccatttttaaaagcaggaatgagactataatcaggtcgttattctgttacaatttaaccgtttatactattactaatagtgacaggaactcagggcaacatagcataaggcatctgataatgagtgaaaacccgcgcacgcggccggaactggctgattttttacgcacaaaacgcgaaagtctgaccccggaatgtgtggggctgccgcatacttcgcgccgccgtactcccggtctgcgccgcgaagaagtcgccgcacttgccggggtgggcctgacctggtacacctggctggaacaagggcgtgaaatcggagtatccacccgctttctggacaacctggcacggacactgcgtctgaatgaagcagaacgccagcacctgtatctgctggctcaccagcgggctccggaagcttccggtgatacagagcatcatgtgccgccggttatcacccggatgctggatgattttccggataattatctctgctatgtgctgaatctgcactgggatgtgctggcgtataatgaaaaagcagatcgttacctgcacttctctgaagcgcagcccgggatgtgtaactttctgtatttgctgtttaccgatccccgctatcagacccgctttacagactgggaaaccgatgctcagcgtctgctggccagtttccgccgggattatgccagaacaaagcatgaccccaatattcagcggatgataacggcattatgtcaggaatctgcggcttttgacacgttgtggaataaacacgaaatatatcagccctgtaacggcatccgcgaaattgaatttaacggcagacgggaaacctacgagtatgcgtccctgacatttgatatcgataaatccaaccggttactggtgtatacgccggttaccggtgaggattaaatcaccgatgccaccgacagcagtaatgccataaggatcatcaggataccgccgcacagattaaaccagcgcagactgttcccccggaaaaatgacgcggatttaacagcatgtgcggcataaacccagataatatcgataacaatgcccagggctatcgggatcagcgacatcagcagcaacacagtggtagcggacatctccggcggaatttcaccggtaaatccgggaacaatcgtaccaaacataatcacggatttcgggttcgcggcaccgacaataataccggcaaacaacgactgacggcctttattcgccggcatatccatcgccatactgatccgggatgcccggacatactgccagccaatcagcagcaaaaccagtaccccgatcagacggataatcatcaggatctgcggagaagacatcagcaccgcaccaattccgaaagaaagcaataccgcaatgctgtacataccgatggcatttcccgccacgcctttcagggcatttttcttcccggcagataacgcctggccgaccagaaacaaaatactcggccccggaatggcaatcagcacggagctggtgatcaccagccccaaaataccctgcagattaccggtcatggctcctgaccggcaaaatagtctgtggcccgcagcagctgatcccggatccccggttcagacatcgcgtgccctgcaccttcaatcaggtgcagcaccgatcccggccaggctttatgcagatgccacgcaaaggttgccggacacggcatatcataacggccgtgaacaataattcccggaataccctgcagccggtgaatatcacgcagcaactgaccttcctccagccagcaccggtgataaaaatagtgattttccagccgggcaaaggcgatggcgaaatggtcatcagtaaattcgccaacgtgctctgcatccggtagcagtgtggtggttttcccttcccacagagtccaggctttggccgccgccagctgaacctgaacatcatcaccggtcagcagtttatgatacgcagcaatcatattgtgccgttcctgcaccggaaccggtgccaaaaaggcttcccactcttccgggaacatctgtgaaacgccaaattggtaataccagttcagttccgcctctgtcacggtatacacaccgcgcaaaatgatttcactgacctgctgcggatgcgtttcactgtataccagtgcgaggctcgaaccccaggagccgccgaataccagccatttactgacaccgatatgctttctcagccgctcaatgtcctccaccagatcccatgtggtgttatgggaaatttccgcatgcggtgttgaacgcccgcaaccgcgctggtcaaacagcagcacatcataacgggctggatcaaaatagcgccggtattccgggctgattccgccgccgggtccgccgtgcaggaaaacagccggtttcgcaccgggtgtgccggtgcgttcgtaatagatccggtgaccatgaccaacatcgagaaacccggtctcataaggctcaatggccggatacaacgtacggaatgttgtgtcagaagaggttgtcatagcaaaatcaccggttagcagtaaacagaattcaccactctaatcaataacccgcataaaagacaagcagtccgtggatttacatcacggactgccatactggtttaacctgctgattcatttatatagtcgtgcattgctctgcatctgaagcaggcttctgcgattttgtccggcgtaaggttatccgcagcaccactaatccggcggcggctaccgctgcccctgcataactgacaccggcataatcaccaccgtttgccagcaccgatgcgcccagcgcggcaccgactgcattgccgagattaaaggcaccgatattgactgatgaggccagcgcctgcgcttctgaggctacctgcatcacttttacctgaagcggcggaacgataccaaaactggccgctccccagataaccagcataatccccgcagtgacagtgtcacgggccataagcggaaacagaaccatcgtcagcgccagcagtgcaaataatccgtacaatgtgcgggaaaccgaacggtttgcccatacaccgcccagataattccccagtgtgaagcccagtccgaccagaacaagcatgatgctgatctgcgtttccggcacagacgagataaaggtcagtgcgggggcaatataggtataaaacgtaaacatggcactggcacccagcacagtacacaacattgccagtaataccgccggacgggtcagtacctgtaattcacggcgcagattaagttcttgtccctgcatattacgcggcagtgatcgcaacagcgccgccattgtcagcaggccgagaagactgaccacaaagaaggattcacgccagcccagcatctgagacagtttggtgatcgccggaacgccgccgatattggcaatggtcagccccataaacatacctgcaatcgccccggcttctttgcctttggctaccacccgtgtcgccaccatcgcaccgatgccgaaaaacgcgccgtgattcagactggtgataaagcgggcaaacagcagtgtattgtaatccggcgccagtgccgacagcacattacctgccgtaaagatgctcatcaggaaaatcagtgccgctttgggcgaacgccggatcagcagtaacgtcatcaccggtgcacccagcatcacgcccagtgcatacaccacaaccagcatcccggcggcgggaatggaaacagccagtgacccggcgatttccggcagcatacccatcggggaaaattccgttgccccgatagcaaacgcgccgacagacagggataacagagcagtatttgttcgcataatgtcctcagaataaaaaacaacgtcacagtgttgtcaggacggcgattctgccacattgatttttgcggaaacagccgctaatctgcaaaaaacaattgaataaaacgcaataatgaaaatcaccctggaagaaatgcgggcatttattgccgtcgttgacagcggctccgtcacagccgctgccgcacaaaacgggctgaccgtatccgccatcagccgcgccctgctgcgtcttgaagaaaagatgaacagtacgctgctgtaccgcaccacgcggcggcttaaactgagtgaagaaggcgcattgtttttacaaaaagcccgtgatgtggtgcaactggcgcaggaagcggaagatgtgctgatgaaccacaaagagatcccctccggcacactgcgtattgatgcttcaacacctgttcagctccatgtgatagcaccgctggtgacacaattccatgaacgttatccgcaaatccgtcttgaactgactaactatgaaggcatcaccaatttactggaaaaacaaaccgatatcgcattccgcttcggtccgctggcggattcttccctgcatgccacgctgatgggctacacccgccagcggattctggccagtccgcgttatcttcagcagcatggcgaaccgaaaacgccggaagatttggcacagcacactctgctgggatttatcacaccggaaagcctgaacacctggccgctgtataacggtaataaaaagggattgaaaattaccccgtcactggctgcgagcagcggggaaattatctgcaatctggcacgttccggcgcgggaattgcctgtatttccgattttgtgacacacgaaatgcgcgaaaacggggaatttcgtcaggttctgacatcatacacttatgaaaacaaactaccgattaatgcggtgtattaccgcagtcaggcactttctccccggcagcgctgttttatcgactttgttctgcaacacagccagtgttttaaacgcaccggttaatctgaacactaccttaagccgctgacggcgcatctcagtatcttctcgacaatatttttcagcgcaattagtcttaaaataaacctgccttgtaaaaataagagagaaacaataatgcaaacggcactgaatgcgctgacagaaggcttttcgccggatgagcccggtgttatcgtcatggtacataccgataacggcgcaacatggtacagctgccggggcatggcggatgtggcaacccgcacgccggtaacaccggacactattttcaacttagcctccgtttccaaacaattcaccgcattttcgctgctgttactggtgcaggaaggtaaaatttcgctcagtgattctgttttgtccgtcttgccggagctgggcgaatatgcacgtccggtgacattacgccacctgctgcaccacaccggcggactgaaggattatatggatctggcttttgcccgtaaaaccggcttttatgatccgctgacaccacaggaaaccctggcggatctggtcagtcagacagaagcggattttccgcccggaacccgccatgattacagtaataccggctattttctgctatctcaggttattgagcgggtcagcgggcagtcatttgctgattttgcccgtgaacggatttttgcaccgctggaaatgaaccatacttttattgttgagcaatatccggcaccgcagaccattgccaccggctacggcaaagctgccggtcagtggcggatttctgaaagcccgtggacacacaccggcgacggcgcggtacattccagtgccgctgacctgatgaaatggggcgaaaactaccgcaccgcccgcatcggtggtactgcgctgatacaacagatgtcagaaaccctttccccgctgacaaaaaacggcacgcccgttacggattatgagccttatgctgcggggttacatacccttcatcatttcggtgagctgagtctggaacatgccggaggctggatgggtaccagcacttactttatccggctgacaaaatcagacaccactatcgtcgcgttatccaaccgcgaagagtgcgataccgaaacgctggcccgagccgctgctgccgcctttctccgccctgcattccctgcgatgatcactgttcgcgggggcgaagaataacaacatgatacagcgttatttccgccggaaacttgccgggcttgctctgctgttactgattgccggactggtactgttttttaccagccatcttgatgattttgattttgacaatgcagtggcaaaagaactgaccttcacctcacagggaaacaggctttccggtaccctgctgctgcccggcaacggacatccggcagcggttgccgtgataatccacggtaacggcccgcaggacagatattcagacaacggatataacccgctgtttaataccctgctggatgccggtattgcagtattttcctgggataaagccggtatcggtaacagtcagggaaactggctgcatcaatcaatggatgatcgcgcagaggaagccgtggccgcactgacattgctgcaatccctttatcagaataccccggtgcagattggctttcttggtttctcccaggcaggatgggtgatcccggcagcggcggcacaatcgcagcctgatttttccgtgattatcggcggtgcggtgaactggcgggatcagggacaattttatcaggggctgcgctacgcacagcagggaaaatcgccgggagacattaaacaattgctggcagcagaacaggcagagaatgaccggatatttggccgcaatggctcaaaagacccggcacaacgtagtgatatgacacccgaccgctttgaatttgtggtcaaaaattatctcagtgatgccaccccggcaatccctcagatgaacgggcgtgtgctggcggtatggggcgcggaagatctgaatgtcgatgcccggcagaattcctgccgttatcagtcacttttgaaagataatccaaagacaaaagtcattgtctttccgcaggccgggcacggtttattacaggcacccgcctataattatcagctcagcagcgactggccggtactgcgccagtggcagtttctgtatgccggacgggaagcctatcatccgggagcattgtctcttatcactgactggataaaaaacaaaatcccggatttgacagcctattacccggtttgtcagtcctgaatcatctgctgataacgggcatagccccgtttcgccgcttcgtgatattgccggttcagcggcgcggtcatactttgtgatatggcggtcatttccggccctgcaagttgcggggagccggtgcggaacggcgggcgcgggtcatattcaatcgccagttcaaccagcgcagccagttcctcaccccgcagggctttcagcaccagtaatgaggcatcaaacgaaccggtagccgggccggaggtgtagatagtatcgtctatcaccacatcactgccgccgacggcaacagccccgacatccggcagcatcggcaccacattactgttactggttgcccttctgcctttcagtaatccggctgtacccagcatcagcgaaccgtaacaggtgccaatcacatattttgctttttgccctgcccgcgcgaaaaagcggatcacctccggatcttcaatcacctcaggcggcaccataccggtcaccagtacatccagatcatccggacactcatcgaaggtcattgtcggcatcgtcggccagccgatatagccctccaccagctcccggcgtttccagataaaatagatttccgcccctgcaatcgtaaaaacagactgcgcaccgttgatatccatcggcatataacccggacagacaaaaatgccgactttcagtaatgcgggctgtgatgcgcgtccggcagcgatcagcgcctgaatggaaggcgtgctcagcccgtaaatagtttcaactgcataatcatgatcagacatcaaaatactccgtgacaacatttatttactaaccggtaaaataatgcatgaggtacaatgatgtaaattgtttttatactgatcggtaatcaaatggcacaaaaaggcagaccccggaattacgacagtgccgccgcactggataaaatcatggcgcagttctggcgcaaagggtataccgcaacgtctctcgatgaactggccgcagaaacggacatgaggaaacccagcctgtacgctgctttcggtaataaagaacggctttatcagctggcaatggacaggttcggtgaaatcgctcaggcgcattactccgccgcactggcaccgcagacgcccggtgagccgctggccgcccgcctgacccgctggttacaggcaaccgtcaccctttataccggagagcacggccctgcaggatgtatggtgttatcgacagccgccgccgaagtgtacgaccctgccatccgcaagcgtctgcaggaagtgattgcggcgcaggagatgatggtgctggattgtctgaatgaagagaaaactgcgctgcacgatccggattgcgccccgctgctggcgaaaacactgactgcgttcctgcacagtatttccctgcgcgcccgggccggtgaaagtgccgggcaactggcagagatggttcgtgccggtcagatggtattgcagtctgcactgacatcaccggcggcataatatccgccggtgagtatttttcagcgcagtgaaacctgaccccggatacagtctgtcacaacaccgccgacccagatcccgtcggcatcctgccggacactcagccagccgtcacgcttcacactttcaccctgccgcgccagatagtgcggcggcaatgtgccgttgctgataagccactgtgccagtgctgcattcaggctgccggttaccgggtcttccgcgcctctgcggttaataaatgcccttaccgcaagtacggcatcactgcctgccggataccgggaaaacacgccgattttatacagcgcgttattccctgactggctgagcaccgcataatccggggtgattgccagcaggcgggcaacggaatccacctcaatccctgtccaggccgggccgttatcaatatattttgcctgcaaaatggcactgcgggggataccgtatgccgatgcaaccgtattgcactcgtcttctgtaagatcccgctcgttaatcatcggtggtgcggcaaaggcagttccctgttcagactgacgcagcgtaataagcccggcggcacattcctgaatgatatcccgcgtttcactgaaaccggtatgctgcttccagacatggcaactgcccagggtcgggtgtccggcaaacggcaattcaccatccggggtgaaaatgcggacacggtaatcagcctgcggatcctgcggtttcagcaaaaaggtggtttcactgaggtttgtccagcgggcaaaacggtgcatttcctcatccgtcagatcatccgcatcaaccaccaccgccagtgcattacccagcagcggcacatcagaaaacacatcaacctgataaaaggaatgggttttgttgttcacggtaattatccttttggtttgttttcagtcagcacagcgctgcctgtccggtgatcacacaggtcacatccccggcaacccatacctgacccgcttccttagtgacaaagattttgccgtcacggctgataacctgtccctgtccggccacatagcattccggtaaaataccttcgccggtcagccactgggcaagcgacgcattcagactgccggtcaccgggtcttcttcccccagagaacagcataatgcacggacttccagctgaaccggtccgctctggtcatcatacagtgcacagaggccgatatcgtacccgtccagcagagaataatccggtttcgctgccagcaccttcgcaacagaagtcagttgcaggccaatccatcccgggccgttatccacccatgcggagcgcaccacatcttcatcacgcagccccagtgctttcacaatatatgccacctgctgcggatcagtatccccgccgcgtaacagtgccggggctgcaaatgccagccggttatcctgctgacggacagtcaccataccgactccgcactcctgaataatatcgcgcttatcattaaactgctgtgtttcgcgccagacataacaggtacccagggtcgggtgtccggcaaacggcaattcaccgtccggcgtaaaaatgcggacccggtaatcggcctgcggatcctgcggtttcagcaaaaaggtggtttcgctgaggtttgtccagcgggcaaaacggtgcatttcctcatccgtcatatcatctgcatcaaccaccaccgccagcgcattgccgagcagcggtacatcagaaaaaacatcgacctggtaaaactgataagtgcgggtattcaacgttattatcctttttatgtgttaacagagcagagctgatgatttttatcacagaaaacgattatgatgaaatcattaaccatcactgtgataaatcgctcatgcagaaaacggattctttttccgggattaccgcctttgtcgccgctgcacagcacggcagttttactgcggcagcagataaactggggatcaccaaatcagcggccggcagacggtgtgtgccgcctgttgccggactttcagccgtattgtgataaaggctgccgccgcaaagacaattccctcccagataatggtttcaacgccaaaactgcggatcatccgcccgccggccattgcgcccagggtgatcccgagattggaaaatccgatatacagactgttggcaaattccggcgtgttcccggcttcacgcagcagccgggtctggctgacaatcagcccggacgtatgcagtattccccagagcaccaccaccggcaccatcagccgcggcgaaggaccgcagagccagaccgccaggtaaatcaggataaacagcagcggatacagtgacgtggttttaatgacattgcgctgtaaataccggctgaaaataaagttgccgaaataaccactgatgccgaacaccaccaataatgcgctggtcgtattgttggaaaaaccggtgatagtgacgagataaccggcgatataactgaaccctgcaaacatcgccgaaaaaatcagtgtcactgccgcaatactcagccatacatcacgacgttgcagaatcgccagctgttcacgcactttcagcgcctgtgtcaccggtaatgacggcacaaacagcgcgatccccgtaaaagcaaccacactggtcagcgcaccgaaccagaacgcagcattgagtgtaaacatttccgcaataaaggcactgagcggcattcccagcaccatgccgacagccaccccggaaaaaacaatggcaatcgcatgggcagatcgtgcaggcggcaccacattggcggccaccaccagggcaatagcaaaaaataccgcgtgcgtcagtgccggtaaaatacggaaaaacagaatcacatcatactgatgcgtaatggcatacgcgatattggaaataataaaaatcgccataatcaccagcaaaactgttttgcggttatagcgccccagcatcagcgtgatggcaggcccggtaatggcgaccaccacagcatagatactgaccagaaacccgaccctgcggtgccgtgatctgcaactgttccgtcagttgcggcaggcagcagaccaatcaccgccacttctgtggtaatgacgccgaagaccgccagtgacagcgagagtaaaatcagcataacgttatttttcatagagatacccgcaggaagcacgataaatgctcctgatataaataatgtgaattgatagtgcggatatatccggtgcttatcctggcaaatctgcgatcagcacggaagatcagtcacggaaactgtcagtagcaaaaaagttgacactctccggaaagcacagtgtcataatggctgcaaagcacacattcaccagagtgataaaggaacagcaatgacggcaaaaatgatcgataaactggcactgatcacactgaaagacggcaaggtagccatggtccgctctcataacaaaaccctgttctacgcgccgggcggcaaacgcgaagccggtgaaactgacgaacaggctctgtgccgcgaaattgacgaagaactgacggtgacactgaaaccggacaccatcacgttttacggggaattcaccggtcaggcggacggtaaacaggatggcacacaggtgcgtatccgctgttatcaggcggaatttaccggcgtactgcaaccggccgcggaaattgctgaactggactggctggacagccgtgatctgccccgctgttctctggtcgcggcactgattgtgaaagacctggcagcacggaaactgatcggctgatatcgcgcagctgcgcaattttgtacaagacagaatgtaacgcagcgcgataataactggttaccgtaaagacagagcaggacacaccatgcagagtgacgggcattgccgtgaacaggctgattattttcatctggacgatttttatggtctggggatgatctctgcccgttactatcagcagaaattcagccgccatacgcacgaaggcttttgtattggtgtgattgacgaaggtgttcagcagtttttccgcaccggcagtaatcattatgccccgaccggcgatatcattctggtgaattccgatgaaatccacactggttcatcggcactggaaaccggctgggcctaccgtgcgatttatccgacaccggaaatgctggatgcgctgatgcaggatctcaaatcggccgatcggggctttgtcccctggttttctcacgcggtggtccatgatcccggccttgccgcacagttacgcctgctgtttgatgtattgctgaagccggataaccggctgctgaaaggctctctgttgctctcaaccctggcctggcttatcacccgtcacaataaaaaaggctttcgcccggcggagatcaccccggccggtcagcgcctgcaacatattgcagaaatgatgaacagccatccggaaaccgattattccctggatgagctggccgcaatggcaaatctcagcccgtggtattttctgcgccagttccgtctgcgttacggtatgccgccccacgcgtggctgattcaggcacgcctgcgcaaagcgcgtcagctgttgcaaaatggcgaccgcccggcggatgtttctttacagtgcggatttaccgaccaaagccactttacccgccattttaaacgggcaatgggagtctcaccgggcaaatttatgcagcgccgctgatcccgctgaacaattttgtacaatctttctgttgttgtgtcatggcagagtatccggactgttttacgctgtacggatgataacaatgacaacaaccacagatttacccgcctctccgctgaaagatttcctcaccggcgcactgcatatgaccccgctcaacctggccgtggtgccgtgggcgatccttgccggatcgatggcggtggacagcggcctgacctttgcacaaagtgtcgcgatgtccgcaatggtctttgccggtgctgcccaactggtaacactcggcctgctgaacagcggtgccggggtgatcaccattatcgtgtccgtcttttttatcacctcacaacacctgctgtacgggctgacgctgcgcccgcatgtgcgccctttttccccgctgcaacgggccggtatcggctttctgctgacggatgaactgtttgcggtcagtgtcgccgggcggcagcgcctgagttttgcttatctgttcggtgccggactgagtttttacctcgtctgggtgctggtcagtattctcggtattgtgctggcacacagcatcagcgacctgagccggctccggctcgacttttcggtggtggcgacattgctggcgattgtggtgccgctgatcaaatcaaaaagtgcactcgccggggccctgttttcctttgtggtcacgattattctgacccgtgccggtattcagggcagcgcggtgattgccggcgtcagcgccatgctgctggccgttctgctggggcgtaaatggggggatgtaaaatgagctggggattaatattcgcactgacgctgatgctgttttcgctgcgctttatttttctgatcccgggattaccgctgcggcttccggtctttattcagcaggccctgacctattccgcgccctgtctgctggtggctatttgcgcgccgattgtattactggaggaacaacagttccgtgatatcagtgataatccgtatttatggggtacgctgttctgtattatcgcctcacggctgattaaaaataccctgctgaccgtggtcctgacgctggtatttttctacaccctgatttatctgttctgattatgtaactatccgcaccggaaacccggtgcggaattcagagaacgttacggtttttcgtgaatttcttttgccagtaccggcaaaatatcaatcgagcgcggtcccggcactaattcggacagattcactttaatataatttttatttttcacggcttttacaccctgcatttccggcatggactcaataaatgccactttatggtcataatcatcatcattacggaagcctttatagacaggaataatgatcacttccggatcagacataatcacatcttcccagttaccgaccgcccaggtttttccggtatttttgccggcaaaaatattcttaacagaaatcagtttcagcatctctgaggtataaccatcaaagaaggtatagggtttaccgtcctgagaatcaaaaataaaggcggttttttccggatacgcctgaatctggctgataacggtattcagtttttctttttctgctgccacgtatttttcagctgtctcctgcacaccgaagatctcaccaaatttcagcatgtcgttaaaataggtattcacatctgctttcggtgatgtcatggattccggcacataaacggcaaccccttccggcacaattttattggcttccagtgccagttttgagaatgagtttgcccagccggtggcgaaatcgggtttgacagacataaagacttcgtaagacggccatttttctgccaatacgggaattttgtcatatgctgcttttaccggcggataaatcggctcttccagaaaagcggtaccgaccatacggtcccccaaatccagtgccagcagcatttcggtggtgatctggctgagagaaacaatacgctgcggggatgtttccggtttaaagtgatattcgttgccatccagttctgcactgaactcaaccgggacataagcctgtgctgttttattttccgcagtggctgtcacggaaaacaatgcagagataaccagggtacctaataataattttttcatcatttcctcatccggattataaaaatatagcaacacggtcttcgaccggtaataccgtaaattccacaccaaatacatcaaacaggcactcccgggttaatacttccgccggtgtgccctgcgcataaatttgcccgtcattcatcaggatcagatactgacagtattttgcggataaattaatatcgtgaatggtcataattacggtggattctgatgcggccagcgctttcattacttccactttatagcggatatccaggtggttagtcggctcatccaggatcataatatcggtttcctgggaaaaacatttcgccagcatcacccgctgtttttcaccaccggacagtgcgtgatactctttatttttcattttttgcagaccaaacaatgccatgtagttgtctgcaatcacgaaatcccggtcgctgtaatccacgtaatgttttttgtacggcatccgccccatcaccacaatttcctcaatggtcagtttgccttccacctggtcattaaactgcgtcagtaccgagatattgcgggcgagtgatttgacagaaaactgagccacatccgtgttatcaaagaaaacggtgccccgggttttgatatcccggtaaatatgccgtaataaagtcgttttaccggagccgttaggcccgacaataccgatcactcttttgccggaaaatgacagattaatgtctttcagtatcccgttataattcaggtcattaatatcaacagtactcacgttaccggctcctgttcgctttaataatgatataaacaaacagcggtgcacctatcagtgaggtcagaataccgaccggaatttcctccggtttaaaccagctgcgggaaatcgtatcaataatcaccagaaatgcaccaccgaccaggcaggaatagagcgataacttaaagtgcttcacggaaatcgtattatggacaatatgcggaataataagaccgataaacgcaatcacaccgacattggccacaataatagagaccacaaaagatgataaaataatcactgccagcttgatggcaccgacatttacacctaattgtgcagatgcatctgcacccagtaataacgtatcaagcacattgctgaataacagacaaaaaattaatactgcaattaatgccaccagcggcagcgggatgtaagaccatttaataccggagaaactgcccagcatccagaacattgcacttttaacctgactttcattcttggacagataaataatggcagtagtgatagcagaaaacagactggaaataccgataccaatcagcaccagattggtcatattgctctttttgaaattaaacaggacaataatagcagtggaaatcagcccgccggcaaatgcaccgatatagacattatacggtgacataaaagcaaataacccgagcacaatggcagataccgcccccgcgctggcaccggaggaaaccccgagaatatacgggtcggccagttcattgcgggttatggtctgcatcaggatccccaccagcgacagggatgcaccggtaattgccaccaggataatccggggcagacggatattataaatgatggtttcatacggcaggagatcatcaccgctgatgcccccgctaataattttgattaccgtatccagcttctgatgaaattccatattgacgctgccgtaaaacagtgaaaaaaacatggcagcaagcaacacagacaggcagataaaaaattgtgaaaaattccggccattcagtttctttttacgccgcacgggtgtttctcttactgcttcactcatcactgttaacctgtatttcatcagatcagaggctgttaacagatttacggaaatatcacattatgataacaaaataccgccataatttgcctgtcagtctctgtttccactatttttctgattatagcggagaatacatcaaggttatgtactcccccagagtatattccgggaaataatccgtgaatatccatatttaatgatctgtatctgattagcacagaataaaacgccggaagatttcccggcgttttatttatctgaacagcactattttaccgcatcaaaattattctgccggaaaatcgtgctgtaaataccaatcactgaagtggttctctgaaattttaaaaaaccggctcttttctcatcccgttcagcatattacagtacaggaaagcaaaacagcgcggagagaaaataaatgagtcagataaatgcattcggacaaactgtcggtgatatcgttccggactggaccgcccgcccttaccctgcccgcatcagtgcggaaggccgtcactgccggatcgatccgctgagcccgtcccatgcggatgacctgtaccgggcattttcactcgcccctgacgggcgttactggacctggctgccggatgaaccaccggccgatctgaatgaataccgcgcccgtaccgaaaaaaatgcacaatcgtcggatccgctgtttttcacgattacggataagcacaccggcaaagccgttggcctgttttccctgatgcggactgatgagaaaaacggcgtcacggaagtcggtcatgtgcatttttccccgctgctcagcggcacggtgatgtcaacagaagcccactggctgctgatgaaatatgtatttgataccctcggttaccgccgttatgaatggaaatgtgacagcctcaatgcaccgtcccgcaatgcggcactgcgcctgggttttcagtatgaaggctgtttccgtcaggcgcgggttgtcaaaggccgcacccgtgacaccgaatggttttccattactgaccgtgaatggccgctggttaaccacgccctggaacagtggctgtcagcggataatttcacaccggacggtaaacagatccgctccctggcatccctgcgtgatgcagcatgaaaatgattgatatcggccgtgtcgcagagctgaccggcctgacaaccgccaccatccgctattatgaaagcaaaggcctgatcacgcctgccgggcgcaggggcctgactcgtatttatgatgaagaggtgctgacccggctgtccctgatcattctcgccaaacaaggacatttttcgctggatgaaatcgcggtcatgctcagcgaactgccgtcaaaagggattgaacggacggcaattcaggcaaaaatcacagaaattgaccagaaaatccgcgagctgcaaaatctgaaacagggattgctgcatattgagcagtgcccggcagaaaaccatctggcgtgcccgaaattccgcaaaatcctgagtgtcagtctgaaaaaaaacagaagcaaagcggtgaaaaatcccgcttgacttaaagttaacttgaagttgtatcatccggcatactgatttccgtttgatgtcattattcactttttctgttgaataataaggaattattatgccgcgttctgtttactggctctctgccgccttagccttatttaccaccgggaatgccctggtgctttccgttgccgttcttatcgggtcacaactggcggaagatccggcacatgccacgatcccgctgctggcacaatatatcggcctgatttccgcctcagtgccgatggctcactttatgatgcgtttcggccgccgcgccgggtttattctcggtaatatcggcgggctggccggtgcattactggcaatcgccggtatttatacacacaacatgctgctgttttccgccggaacgttctttaccggtattgccatcggtaccgcccagcaataccgctttgccgcactggaggaagcccctgccgcgctgcgggcaaaagctatcggcgtggtgatgagcggcgggattatcgccgtgctgatcggtccgtcactggcgatgtccacccggacactggtggcggcttatccgttcctcggcacgttcggcgcgctgatggctatttatctgatggcttttgttctgctgacatttttgccgctgaaagctcagcttcccgctcagatcagcgataccgcaaaaaaccgcccataccgtcagttatattcccagccgctgctgattctgatcgccgtggtcagtgccgccgggtatgcgctggtagtgtatatggtcggtgctttcccgctggcgatgaaagcgcagggatttgaattcccggcaattgcctttgtgtttcagtgtcatatactgggaatgtttgcgccctctttctttaccgggcagttaatcagccgggtcggggtaaaatgctttgtctggctgggagtgatttgcctgttaatcagcaatgcagtcagtctgaccggcagcagttacgcgcattttctcattgccatgacctcgctggggctggcgtggaactttattctgatcagcaccacgcatctgttgccgcgcacttataccggcaatgaacgggctagaatccagggtgcgaccgattttcttatcttcagtttcggggcgcttggcagtctgctggccgggttcgccttctgttatgcgggctggtattccgtaaatgtcgccggattggcaaccggtattgtgattctggtagtgatgtttttactgcgccacagtatgaatgaatccccggcggaaaaggccgccgcctgaatacatcaccgccgctgccttaacgacagcggcggatatcattactgcaccgccgaggttttatactcaatgccgtcacggtttcctgtcaggctattgctgtagtgactctcctgaaaatagaacagacgattgcgccatttatcaaataaaacggtttccccgtactctttcgccaatggtgctgctgtattccagttcagcccgccatcatccgatatccgggtttctgaacctgaccccgctatcagtaaatcatcactgccgccccgcagtccgttaatataagatccgccggtttccagccgctgtgaataatcacccttacagttaaagtggttaacctccggccgtttacgggttttttctgtcagcacaaaataaatttctccgccggtggtactgtcgagcgcgtcaatctccccggggacaacctgatcagattcagtttctgaggtccgggtattaaaacaagccagtatcgtgttttccggatcattttgttcatccttcatccatgcgatcacccgcgcgtctccgttatagtgccatttagtggtgctcaggctggtataccagcgtccgtcatcctgataccgttttttccggttatccatgctgaataaaggccgccagcgttttccggaatcacgggtctgatacagtgtgtccctctgcaccatcagcacactgccgggttctgtgatagcgagaagctgagtctctccggcgggttccggcattgtccactgtgataaccactgccactgctgaccaccgtcccgggagtaaaagatatattctttgccgtaggaggcataatcactgaaaataatcaggcagcgtccctgtatatcacacagctggctttgtacccggcccatgaacatcgcgctgacccgtaaatcccctttctgctctgtcataatataggtgaccggcaccagcggcctgtcactgtagacttcactgcgcctcagattataagtttgtttgtgcagataatcgccgatggcttttttatccggggatattttcaggttcagcagcggaatatcaggctcttctgccgggttaaaagcaatatttttactgtggctgcaactgcgggttttctgatcacaggtaacgagatcaacccgcatagcgtctctggcaccggttatcatcacaccatcgcggaaactgctgatggccggtgacgttagttctaccgcttttttttccggcagataactgcgggtgcgtattctctccggcgctgaaaaaaatgaatcagaaaacgtcagcatcattgaggtgataaacacaaccgccagcaacgtgatccgggtacgtccgtcggcaaacatcagttaatttcctgtacaaacggatcttttccgttccgttgtctggcctgaaccagcatctggcgggtaaacacaaaacgggccgaagccgctgagtattttcgtggcaccacttttgataatttcacggcaatcaccggaaaacaaccaatgtccgtgaccggttttatccgtaaataccgccaccatttccgctgacagaggcaacctatgacatcatcccgaataccgccctgcggacgccctgctcaccggggcagcaaactgaccgcagaaaatattctgtccggagcaggaaaactgttacaggaacagggaaaagtaccgtcgatccgcgtccttgccgcacagttgcaggtcgatccgatggcgatttattattacttccgcaataaacaggcattgctggaagccctcgccactgccctggtggatgatatttatcagccatcggcacaggctccggtacaacaggagcttcagcgactggcagaaagttatctgcatctgctctatatttacagtgatctgctggatattctgttatcactggacagtgacggcccgtccggctgtttccgtcagcgctatctgcgcattattgcaccctgcgggctgaatgagtcacggcagaccgctattctgcatctgctggcggatgccctgcacggccatacggtggcgatccgccggactgattacacctttgaacagagccgggcgctgtttcagccggtactggcattaattaccgaacttattgaacgccccggagcatcattatcatgaatatctgccctgttaccggtttacccggcgatttaccgctactggaaagcattgctcaggttttacaccaggaatggcaggaactaccgcagtggcagacaccggaaattatcctggcgcgtctgataaaacggatgaacggtgataacggcgaaatgctgtttgtcgccacggataaaaacagtgcactatcggggacggccagcctgatctggcgggagctgaaaacctgccatatggcaaatgcggactggtggaccggcgagatttacaccctgcccgcagcccgcgggcaaggcctcggcagcgccctgacacaggcggtctttgccgccgccggagagcgccacctgccagcactgaatctctacacgccggataaacaggccatgtatgcacggatgggctggcaggctatatatgatgatgtgatcaatgacgagctggtcacggtgatgcaacggactgtcagcgaagcgtgattcagggcttcagcgcctttctcagcaacacacgtaacccgcagagaaacgcttcccggctgaactcaggttccgtcagctcacgccccagcgtgccgtccgccatcaccagcagccaggacgccgtctgtaccggatccagctgcgggtcaatctcaccggcagccatgccgcgtctgagcacatcacagaattttttgtgcagccgctgctcattaacaacaaaagccgtattcagctcagggttacggcttgcctcagtgataatctccaggctgagtcgggtataacccggctcgttatacaacataatcaacgccgttatcattttttcaataatatctgccgtatgtcccggcgcatcaccgatactcagaatcgccttgtggtcatcctcgtccagttccgcaatcgcttcaatgatggcgtatttagtcggatagtaatgaaacagattcccggggctcatcccggcggctttacaaatctccgccgtcgaggtggaatgaaaacctttttcgataaaacaatgcattgcagcgtcaaggatctgacgacgtttgcgctgctgcttttccgttaatttttccataaggaagtgtctccgaaaaaccggataatagaaattagactgattactctatctattataataccacattttctgtattgaagattatgacaaacataataaaaaacagtacatctgctactgataacagcagattaatcaccgaatgtctggatgaaaccgggttagagcctgccactgccctgttttatcaggcattttcatccaaattcaaaacggtcagcaccatgccggatgcacagcgtcaggccgtgctggcgatgttctggcagcgcgggctcagtgacccgtatgaccgccactttcaggtaaaacgtaatggcagactggtcgccgtatatggcctgactttcggggttaaacacccgccgcagcacgccccggcaccggtttcttctctggctatcctgcgcagagccggttttattccctttctgaaaatccgccggatttttcagatgtttgtccatattccggcggcggatacggcttatctgtcctacctgtgtgtggatgaatcactgcgcggtagcgggataggcaatcagattctcgatgagatcaccacacaattacgggcggacccggccattaaccggttatcactgtatgtctctgacttaaatataaaagccagagagctgtatctgcgccggggttttcaggatgtgaaatacgaaacctcacgcaccaccgaacgctatatggatatttacggctggtattacatggccttacccacactataatgagctgattatgtttattctgccttccggacatttaccgcacaccgccacccggatggcgttcggcgtaaacccgtgcatgggccgtcagcggacagagcaattgttgtcgcactatctcaggctgaaaaccattatccggctgaatgggatccgtaatcatgatattactgatgcacatattgatttttatgcccggtgcataattctcttactactgacggacagacacatgacaccgattaactggcagacagctgccctgcatgacctctccccgcagacactctaccgcctgctggcgctgcgcagcgcggtatttgtggttgaacagacctgctgttatctcgatccggacggcgccgacctcacggcgctgcacgtttgggcggaacaggacggtgaaatcatggcttgctgccgtattcttccgccggaaaacagcacggcaccggcagctatcggccgggtggtgatcaatccgcaattccgcgggcaaaaactgggctatccgctgatggctaccgccgttcaggcggtataccggcatttcgggacacggcgcattgttatcagtgcacaggcgcatctgaccgctttctatgaaaaatgcggctttaccgtctgttctgacgtttatgacgaggacggtattccgcattgtgatatgttccgccccgctgccgattaatcccgagctgtcatcagccggtaaaatgcggattccgctaaccgctgatggtccgcctcacagccctcacgcccgctgataatttcattacggtagctggtaaattgccagtgtggcggacggatatctgataaagggtattctcccggtacaatccccccttctgtcagacggtattcaagcccggtgataaatctgcgggtttcactgagcagctctgcgctataaggatgttcacccggaacaggacgaacatacaaagttatctgggctccgcgtttaactctgctgtcaggctctgcctgtgaaatatccgttattttccatctgtcacagggattgttatctgaaaacagcgctcctgacagcatagtgaccgcttgtgcaatctgtgattcatgcacactcaaatgaaatttatcaccttcaaacccaccagcgcagtgaggtttctctctgcgggcgcggataaatacatcaccgcaatcattagataaatgaaatccgttatatcgtgaggaataaccacattgttgcagcatcggataatccggcgcattctctgcctcttttatgaatgaaaccggcatttgtttcatctgtatcaataaggcatcaatatgctgtttcaaataatcatctgtcggcaagtgtgtttttttatcatctttctccggcaggttaagcagtgaaaaatccagttttaatccggttcgctttaatggcatggtgtcgtccccgttatacaaaagacgtttttatcatgacaccacagagaaaaacgccagaaaataaccttctgttccggaagtttaaggcaaattaagcaccaccattgtctgttattcacaggcaatggtatgatgctcgtatccatcaactcagaaaataaataaggaggctaattatggtgttaagttatgtgattgaattctcaaatttctttggtaatcgtcagaactcaggcttttctgttaacgctgtgcgttaatcctgcctgagtgaagctttactgaatttaacatccttcctcagcttacagggttatcgcgttttatgacccatggcattgttatgcctgaaatttgagtaagctatgagcacattattatcaacccgtaatctgtcattccatcccggtcacacaccactgttaaccgatatttctgtcgccctgaatcagggagaaaaaatcggcctgattggtcataacggctgcgggaaaagtaccctgatgaagctgttgtccggccagctggcaccggatgaaggcaccattaccccggccaaccgcgtcattatggcgtatatcgaacagcatctgccggaatccctgaataccctgtcactggcggatgccgtgctggaaaaattaccggcggaacagcatctgtccgaaatgtggcgggcagaaatgctgctgacagagatggggtttgacccgctacagtggcagttaccggtcactaccctgagcggcggccagcatacccggctgttactggcacgggcgctgatcagccggccggatttattattgctggatgaaccgggcaaccatctggatctgccgaccattttgtggctggaacagttcctgaaaaactggcgcggcagctttatcctggtttctcacgataacgccctgctggatcacgtcaccaactgcacctgggtgctgcgggacggtaatgtgtcggtgttccgtctgccctgcacacaggcgcgggaagcgctggcgcaacaggacgaaagtgatgagcaccgccacaatgcgcagcagaaagagatcgaccgcattgcggtaagtgccaaacggctggcgatatgggggaaagtgtatgataacgaagccctttcccgtaaagccaaacagatggaaaaacagatagaccggttgcaggatgatcaggttgaactggcgatcggcagtcagtggcagcttaagctgaccggggataccctgcgggcagaccggctgtgtgcctttaatcagctgtccgtgatcccggcagacaattgtccgccgctgtatgtgacagacaatgtgtctgtgaaatccggcgaccgcattgcggtgatgggcgcaaacggcaccggaaaatcctcactgctgcggatgatctggtcacagtctcagaaaccggaggtaacactgccggacagcccgctggtgctgcatccccgtgtgcatttggggtattacgaccagaaactggtgcaactgaatgacagtgattcactgatggatgcgctgaaaccattcgcgcgactgattgatgagcagcggaaaatggcactgatcagcgccggtttcccgtatctgcgccatcagcagacggtatctgccctgagcggcggtgaacgggcgcggctgttgtttgtcggactgagcctggccaactattccctgctgatactggatgagccgaccaaccacctggatatggacggaaaactggcgctggcggaggaaatcagccggtttgagggcgggctgattctggtcagtcacgaccgggagctgatcgaaaaaagctgtaaccgcttctggtatatcgacggtaaccgactgacggaatatcacgatctggatcaggtctatgatgctatccgtgccctgaatgcagattccggcaccggcaacagcgtgttaccggcggttccggagccatccgttccggtcagtgacgaagaggattcgctggcggcactgattacgctggaggaaaaactggcggcggatttgcagcgcaaacccgcacatcagaaaccggttctgcaacaacagtggcgcgaacagattgcgcaactgcgggatgaactgggactgtaatacgccattataaatgcaggccgttacgttttttgtaacggcctttttaattcattttttaagtccgtctgcttccagccatccttctgtgactttaccggtggccggatatatataacggccatgaacaaatccctgatatggctgaggacgatccacccagatcgcatcatctttcaccacaaaatccgcagcatccgtaatacaacccttatccggagcatcataaaaacgcaggcgattttgtgtcacactgtatttgtatgaggaaggcttactgtttttcaggcccgcctgatactgtttgtccgcgttcacggttgccgcatcgcacagcgcgtcctgtgacgccagccggttaacattaatccagccctgcgcattgccgtaagccaccagcagccagccctctttttcccctttcaccggtttcgtggcccgcaatccgaccacctgaaggacatctcccggaaccacaaagacattatcattacggcactgttccgccggcgcggcgtaaaaataagcccggcctttgccggtgacgcgccactccggcgacatggcaataaagggttcgtagcggagcgtactgaggatctgctgacacgttttctcttttttcagacaggattgcagccgttccccctgtgccgcactgaaggtcagcgggacgggatgctccgcatccgcccctgtcgctgtcagggtattttctttgatattgtaagtcacccagcccagttgccctgctcccggcgattcaggcgagggtttttgccgcgtatcagaaagctgaatcgccagctcgttgatatcccggttttcaatataaatccccagcctgtccgcagtgactttttctgcgcggacgagcccgtgattactgcctgcaatcagctttatcagctcactgtcacagttaaacaacgggccggtcgctgtcgcaggaattgttgcgtcattatccataatgacctccgccgttgccggtgcggcggctgccgtcaccggcaaaacagcaaagaataaactgctcagtaacattgttgttcgaaaaacatctgtgcgaaaacgcatccgtatcccttatattcttaaccggtttcctgctgcaatgcctcgcgctgcaacagacgttttttccgttcgatcccccagcggtaacccgcgagttccccgccggttctcaccacccggtgacacgggatagccactgccagacagtttgccgcacaggcaccggccaccgctctgaccgctttcggggagccgatccgctccgcaatctcccggtaactgacagtcgtacccgccgggattgactgcaatgcctgccagacccggcgctgaaatgcagttccccggatatccagcggcagatcaagcccggaagacggtgcttccacaaacccgatcacccgggagaccacctgttcaaactgtgcgtcgccaccgaccagttccgcattggggaactgatcctgcaaatcccgtaacagtgcttccgcgtcatcccccagcagaatggcacaaatgcctttttcactctgcgccaccaggatgtcccccagcgcacatatcgccagagcaaagaaaatccgcgcccctttgccgcctgcccgccagcttttcggcgtcataccgagcagtgtatccgacgattcataaaaccggctgccggaactgaagccggattcagcgattgcgccggtgattgtcgtctgttttgtcagttgttccctcagtttatccccgcgataggcttttgcccatgccgccggtgtcagtccggtatgtgagcggaaaatacggtgaaaatgaaactgactcacgccgcacagtgtggccagctctgccagtgacggcagcggttcaccattatcgatccgcgtttccagctcacggcaggccagcaccacctgttccgcatggcgctgcgtcatggcctcaccgctgcgctgacggcgcttcccggcgcggtagccgtgagcctccgcctcttccggcgtggcaaaaaattcagtattttcccgtttcggcagccgcacaacagtagacggaaatccccatgtctgtgtggttttcaccgcatacacaaacagcgtatcggctgttttatctctggcggccagcgctgcccagcacgcatcgtctgagagtattgtctgttttgtcatcctgtttctccgttaccgcgcgcagcggaaggtcagattaaaccgccgggcacccgcaagcggatgcaccccggcccttaccggacggacagcatggtaattcagacgggaacggccgccccataccagtacatcgccgtgctcaagcgcaaaggttttcaggggatgatggcgctcactgccgccgaactgaaactgcaccggcagaccgagtgaaaatgacacaatcggctggcggcgatccggctcatccttgtcctgatgcagagacataccggcgcccggcgcgtaacagttaatcagacagctgtccggcgaaaacccgtgaaagcccgcccgctccgcagcctgctgcgacagcaacaaaaatgcgtccggcagcggcggccacggattgccggtcagcggatcagtcggggagtagcggtaacctttggcatcggagacccagccgtatgtgccgcagctgctcatggccgcagacatccggtatccgccgggcgtctgcatatggcggaacggcgaaatggcggtcaggcggcggatttccgccagcagcatctcatcctcatcactgagaaaacctttgagcagatacgcatcgggtgccactgcaagcggttcatcgtgagcaaagagatctgacataacgcctccgtcctgtttcctgtgtctttccggtgatgacagtattgcaggccggatacagacaaacactccggctcttgcttttcaattctgaggcacagtataaagcggcggacagtcaggacgaagtgttctgttcctgtttcagacggcgccataaggtggtgcggctgatccccagccagtcggcggcggcgcggcgatccccccggaaacgggctacagcttctgttgccgtggcggtattcaccggctccggcgggagatcggccacaagggcgggagcaatcaccgtgcgccgttcaggagagagtttcagtaataatgattctgtaataattttatccggataagcactgcaatacagcgccacccgttccatcagattacgcagctcgcgggcatttcccggccagtggtagtgatagaaaaaatcactgcatgccagaatctgctgcagatggccacgatgcagcggcagatccagctcagcaaacgccagtttgagcagtttttctgtcagtaacaggatatccgccccacggtctcgcagtgccggaagctgcagacgcagtacccccagccggtaaaacagatcggcacggaatgtccctgccgccacccggttatccagatcattgtgagtcgcacaaatcacccgcacatccacggtaatcggtttatagccgccgatacgcacaatggcacggtcttccagcacccgcagcaggcgggtttgcagcgataccggcatttcaccgatttcatccagaaacagtgtgccgccgtccgccgcctcaaataacccggcacggccgccgcgccgcgaaccggtaaatgcgccctcctcataaccaaagagttccgcttccagcaggctctccgggatagccccgcagttcaccgccacaaacggtgcagcgcgtttcgtccgcttatgtttatgaaacaacgtatattcatgatgaatagcttgtgccgccatctctttaccggtaccgctttccccctggatcatcactgtcgcttttgagcgcccgaacagcgtgatggtttcacgcacctgttccatcaccggcgaggtgccgagaatatcattcagcgtatggcggacattcagagagcccgccaccggcagcggcatgttctgcggctggtcacggatgcgcgtcagttctattgcatcggtgaatgcccggcggacggcatcattggaataaatgaaaatgcaggtcatgccgcactctgcggcgatatcagtgattaatccggcccccaccaccactgaaataccgtccgctttcagggcaagacaggctgcccgtgcgtcctcggcggtcacataactgcgttgctcaatctgcataccgaaactctgcgccagcgagtccagtgccggaaaagtattacggtaataaatgaggccgatgcgctgactgagctgccgtgcccgtgccaaagcctgcatgatatcgaacccgcccggcgcagcgacaatcaccggcaccggcagatgctgtttcagatacgcaccgttagagcctgcactgacaatcgcatcgcagcgttctgttttcagccgttcacgaatcgcctccactgcggcatcgaaccccagattaatcgcactgataccggcacgggcactgaattccgggctgatatcacggaacagggtaaaaaggcgtgaaatggagaccgtccagatcaccggtttgtcactctgagccatgcgtttctcccctgtttcatgcgtttcagatgtttcatattaatcttatgaaacacattaacagctatattgaaacataaatagcatcatcatcacagaaagctaacattccgcttgtcagacggaatcggcaaattctatagtgggtaacgtaatgacaggataaacacgccaaatgtgtgatgtatctcgcgttttagttaccttacccggctgattggcatagcgattgctttataacatctgagtatcaaactaataacaaggtgaatatatggcactttattccgcaggacgcgcattccgcgacgctgtacagtctgaatccccgctgcagctggtcggtgctattaatgccaaccatgcactgctggcaaaacgtgcgggttacaaagcaatttatctctccggcggcggtgttgccgcaggctctctgggtattcctgacctgggcatttccacactggatgatgtactgacggatgtccgccgtattacggatgtgtgtgatctgccgctgctggtggatgcggatatcggtttcggcccgtcagcctttaacgtggtacgcaccgtgaaatccctgatcaaagccggggctgccgggatgcacattgaggaccaggtcggcgcaaaacgctgtggtcaccgcccgaacaaagaaatcgtctcaaaacaggaaatggttgatcgcattaaagctgcggttgatgcacggactgatgagaatttcgtggtgatggcgcgtactgatgcgctggcagtggaaggtctggaatccgctctcgaccgcgcacaggcttatatcgatgccggtgcggatatgctgttcccggaagcgattacagagctggcaatgtatcgtctgttcaccgacaaaatcagcgttccggtactggcaaacattaccgagttcggtaaaacaccgctgtttaccctggatgagctgcgcagtgtgaatatcgctatcgccctgtacccgctcaccgccttccgcgccatgaacaaggccgttgaaaatgtctataacaccctgcgccgtgaaggcacgcaacagagcctgatttcacagatgcagacccgtgatgaattataccaaagcattaactactacgattatgaagataagctcgacgcactgttttcgcagaaaaaataacctctgaaagataacgcgaagcaggttgtacactcactataataataaggatcacccgtcatgaatgaacaacttagcaaacctgaacctgcactgaagaaaggcaaaaaatccgtcgcactgtccggcgttgctgccggcaatactgcactctgtactgtggggattaacgggaacgacctgcattaccgcggttatgacattctggatttagccacacaatgtgattttgaagaagtcgctcatcttctgatccatgaaaaactgccgaacgccgcagaactggccgcttacaaggcgaaactgaaatcactgcgcggcctgccgcacagtgtgaagaaagccctggaagcgctgcctgcttctgcccacccgatggatgtgctgcgtaccggcgtgtctattatgggctgcgttctgccggaaaaagagggtcatccgttatccggtgcccgtgatatcgccgatcgcctgctctcttccctgacctccatgctgctttactggtatcactatgcgtttaatgatcgccgcattgataccgaaaccgatgacgatacctgcggcggccatttcctgcatctgctgcacggcaaaaaaccatctgaaaactgggtgcgttttatgaactcctcgttcattctctatgcagaacatgagtttaacgcctccacctttgctgcccgtgttatcgccggcaccggaacggatttttactcctccgtcaccggagcgattgccgcactgcgcggaccaaaacacggcggtgccaacgaagtgtctctggagatccagaaacgttacagctcaccggatgaagctcaggcggatattctcgcccgcctcacccgcagtgaagtcgtgatgggcttcggtcatccggtgtataccattgctgacccgcgtcaccaggttatcaaagcgatttcccgtgagttatccgaagaagccaaagatttccgcctgtttgatattgcggatcgtattgaatccgtgatgtcccagcataaaaagatgttcccgaacctcgactggttctcagcggtggcgtatcacctgatgggtgtgccgaccgccatgtttaccccgatttttgttattgcccgttccgcaggctgggctgcacacatcattgaacagcgtctggataataaaattattcgtccgtccgccaattacaccggaccggaaaaccagaccttcgtaccccttaaagcgcgctaattattgattaaaaaggaagataaagtatgtcagcatcttttaccccacagcatcaagagtacgacaaggtcattcaggacatcactgattatgttctgaatatggacatcagcagtgatcgcgcttatgacaccgcatattactgcttcctggataccctgggttgcggtctggaagccctggaatatccggcgtgcaaaaaaatgctcggccctgtcgtgccgggaaccattgtcccgaacggcgccaaagtaccgggtacccaattccagctggatccggttcaggcggctttcaatatcggtgccatgatccgctggctcgatttcaacgatacctggctggcggcggaatggggtcatccgtccgataaccttggcggtatcctggccgttgcagactggttatcccgtgaagcgattgccaaaggcaaagcaccgctgccgctgaaacgcgtgctgaccgccatgatcaaagcccatgaaattcagggctgcctggcactggaaaactcatttaacaaagtcggccttgaccacgttgtactggtgaaagttgcgtctacggcagttgtcggcgaaatgctggggctggatcgtgagcagttattaagcgcggtttcccatgcatgggtggacggccagtctctgcggacctaccgccatgcgccgaataccggttcacgtaaatcctgggctgcgggtgatgccacttcccgtgcggtgcgtctggcgctgttcgcgcagaaaggcgaaatgggctatccgaccgtgctgaccgccaaaacctggggcttctatgatgtgctgtttgacggtaagccgtttaaattccagcgcgattacggctcttatgtaatggaaaacgtgctgttcaagatctcattcccggcagagttccactctcagaccgccgttgaagcagcaatgacactgcatcacaaactggcggcactgggtaaaaccgcagatgatattgagaaagtcactatccgcacccatgaggcctgtatccgtattatcgataaacacggcccgctgaataacccggctgaccgtgatcactgtattcagtatatggtggcagttccgctgatcttcggtcgcctgaccgccgcagattatgaagacgggatcgcgtcagacagccgtatcgatgccctgcgtgcccgcattcactgtgaggaagataccgcgttcacccgtgattatcatgatccggaaaaacgctctatcgccaacgccctgaccgtgaccctgaaagacggtaccgtgctggatgaggttgtggtcgaatatccggtcgggcacgcccgccgccgtgaggaaggtattccgctgctgctggcgaaattccgtaccaatctggcgcgtatgttcccggaaacgcagcagcagcgcattctgaatgctgcccgtgaccgtaaaacactcgaatccatgtcagtcagcgagtttatggatctgtttgttatttaatttctctgcccggcaacgcagaaaaacgaagcggatactcaggtatccgctttctgcttatctggcttcaaatattattcagcctggaacatcgccataatatcctgctcagtcagcatcggtgttttttccgcaaaattgtaatacgccggtttgctgtcggtgtaaatctgcattgagaggcgggattctgttgtctctcccagcagtgccgcagagacataatactgatctgccggtttcaggtaataaaacaggtgtgtcccgcactcgcggcagaaacaacggtcgccccactctgaggagtgataacgggtgatatattcctcaccgctgagcgtaacatcactgccgcaatccacagacataaacggtgcgccattccattttctgcacatgccgcaatggcagacagagacatcgtgcacctgttttggcacagatactgttactttaccgcacaaacattgaccctgaaccattttctgtctcctgtatataatcaggttgttattgattaacttcagtgtttttccgtgatgaaaactgaaaaacggaatctgtaacccgctttctgtcatgcagacacgatacactatcaggatattaccaccggtattatatcgccatggttattgttattttttccggggatccccgctgacagaatcggagtatgtgatgattgttttaattacaggtgcaacagcaggttttggtgaggcatttgcccgcaaatttattgagaacggccataccgttatcggcaccggccgccgtattgagcgcctggcaaaactgcaaaaagagttcggaagcaaatttttcccgctggctctggatatgacagacagtccggcagtcgataatgtgattaattcactgcctgaatccctgcgcgaaattgatgttctggtcaataacgccggactggcgctgggtatggaaaccgttgataaaggcaatccggcagaatgggatgtggtggtggacaccaacatcaaagggctgctgcatatgacccgtgcaatcctgccggggatggtggaaagaaaccgtggtcatatcattaatttaggctcaactgccggatcatggccgtatgccggtggtaacgtttactgcggcaccaaggcgtttgtccgtcagttcagcctggcactgcgcgcagatctggccggtaaaaaaatccgtgtgactgacattgaaccgggcatggtcggtggtaccgagttctccggtatccgctatcgcggggatgaagaaaaagccgcaaatacctataaaaatactgatccgctgatgccggatgatatcgcggaagcggttttctgggttgcaacattgccgtcgcacgtaaatattaatactatggaaatgatgccggtctgtcagtcattcgccgggctgagtgtgcaccgcgaaggctgaaaccaccacaaaagataagccggtatccgtataatcaggtaattttcttaaattacctgaaattatcgctgaaaaacgttgtcttttattggtgcattaatacactttgctataatgctcacgatcagaatgacgtttgcaggtttgaactttgaggaaaacacgacaatgactaactccatgctcaaaaagtggtttatcgcgaccgcctttgctgcacccttcatgtttgcagctcatgcaggcgcagccaccaccaattgcagccccggcagcacttgtgtgatcagcggcggcgatactgcgcttgaaaaagagagagcacgccaggaaaaagagcaatgggatgatacccgttccctgcgtcagaagatcaaccgccgtgcggaaaaagagttcgacaaagttgaccgtgctattgatgctgaagatgcatgtttaaaaagctcggttgttaccgcgtattgggaacctaatacgctgcgctgccttgatgcaaatacagggcgtgaagtttccactggctggaaataaatacatttaaggataaataatgaaaaaactgattgcgctcagtgctgttctgtttgccgtttcgcctgttatggcgcaggcatcctgtgaaagtgtgactgaggaaatttcgcagaaaatcatcagcaatggtgttcctgctgacggttttacactgactgtggttccggctgaagaagcggcacaggcagaaggtcaggttgtgggtaactgcaacaacgaaactcagaatattatttatctgcgtaaatagtatctcgctgtcaggttttgaccatgaaaaagggctgatttatcagcccttttgtatttcttaccagagactcaggacgccgctaacgcctcaccccagagcatttcaatctgctcttcattgagatagtgcgacaactcccgctcttccggacgcagcagatacgggatctcgcccagcagtggtgccggtaaatgcgtcagtaagcgatccataacctgtgcgtagtgtgataagcccgggtttatccggttcgcaatccagccgataatttccagatcatcatttttaatggcttcggcggttaataatgcatggttcacacaaccggactggatcccgaccaccaggatcaccggcagtttttcctttttcacccagtcggataaaaaagtctcgttattcagtaaataacgccatccgccgttcccttccaccacgacctgatccgccagatgacttaatttttccagaccctgcgataatgcaggaaactgaacgtcggtcgtcgtctgaccgtaattactttccagcatgaccgggttgatatcctgataagaaacatcaactgatgatgaatcatgcaggatcatcgcatcacggttacgtttgccgttaagtgtgtcgtggtattctgtcgcgattggtttatagccaacgacagatttacccaggcggttgatggcttgcattaaagcccgcgtcgcaacagttttgccgatattcgtatctgtgccggttataaacaagcgccttaacatagatgtttttccgttatatcaagaggtgcgtatcaaaattgataacggaagcagtgtaagacatccggtttatatcaggcttgcgccagcgcaattttttgcgaaaatcctgttttcatgaacaaatccctgtcatttatttgttttatgtcaaagatagacactacagaattatttaaccatccatcagtctgataagaagtgagccgttatacagcacctctttgattaacgccgcgccgggtaatgtaccgcaattagtaaattcgcatgaagtcattgtcagctcccggctgaatgccggcaaggcacgctgcgtaatccgggcgcggatggcgggaaacaaaacagaggatgccgggtttaatggtgagccaatcaggataatctccggattaaagatattgaccatcacggcggcaatatccccgatatgctgccccacctgctctatcagctcacgggcggcgggattaccgtccagtgccgcgcggcacagcatttcagcggtcagcggctgcccctccggaacggccaggaactgagcggccatttccaatacatgatgcagaccaatttcagtttccagacagccgtgattaccgcagtaacagggtttaccctgcgggtttatctgtgtgtgaccgatttctgccgtgctgtgactgccggcatgcagcaatgcaccgtcggtaataatggcagcaccgacattttcatcaatcaccagttggataatattcctgcactctttcgccgcaccaaaaaaatattccgccagagaccaggcagaaataccatgctggaggaataccggcatcccggtatgctgataaagaatctctgctaccggtaaatcggtcagctgatagtacggggaatggcggatgataccgtttgcagggtcaacaatggcatcggtggtgatggcaatagcagtcaggcgctcggttatccggtgattacgggaaaagaaggcatcaacctgtgccagaaacagggtgacaaaatcccggctatccgccggaaatgcaataatatcttcggccagtaattttccgctcagttcccgcagcgcaaaaaccagttccccccggttaattcggatacataaaaaatgccagccgtcacagtccgttttcagccccactgccgggcggccgcgaaagcctaatcccggaaactcagtttcccggaccagatgcgcatccatcagctcacgggtgattttggtgatactcgccggtgccagctgtgattttttcgagagtgaaatgcgggaaatggggccttcacgatcaatataacggtacacaacccccatattggtttgttttatatggtcaatatgtccgggctgtgctgaaggtttcaccaataataatcctgtgcagatgatgctaagatgttaattatccgaataaatacgcgcttagtaagtggcttcacacaaaactgtgaaatgattcacagtcagggggcaaaagccgaacgataaaccacaattcctgttttattttgcagatatgtccgtaatggtgaatcaatgacccgttgttcattccgttttgatgaggcattacgtaaaaacagcccgtccggggtacggataataactccggcatgcgagacatccaggccgggacggtcagaatagataccgatataatcaccggtctgcaattgtgaaagcacagcgggtgtcagtgcggaaaccggcagccaggtgatatcccgtgccgtaaccggaatatcggggatataacgggagccgttttttttctgattcagcatcttgtgtgtcacccggtaatccggcgacagttgccgggtgatatcctgagccacaggctgcgggccgctgacccaatccgacaaaaaatgacggcgctgataataattcacctctccgtttttataacggatgtgcatcagtctgttgcggaaattctgctgctgcgggctgcgtttcagtgcttcggtgtaatccagaaaagtgaaacaatcgagcgcgttcaggtcagccaccagaatttccggtgatccgggagagccaatcagctgaccggcgcggtaaggtacgccgagaaactgcccggtcagtgcagtaatattgtcaggcgcaattttgcgtgagccatccggctgatagaaatagctgagcgatacccctgctcccgcggcgcttgtatataaaagaaaaagaaatgcggtaataacagaaaaccggtatcgccggaacatccgaactcctgacagtcagatcccgctcagcggaacacattatttttcagcatctcaatcagccgctgaccggccggagaaagtgtattgtgcttatgatacaccagccagacctcagaaaatgcctgattttcagctaaatgaatgtaacggacaccatccactttcatacgggtaaaagattccgttaccagtgaaacacctaacccggcagagaccagccccagaatagtcatagcttcccctgcttcctgggcgataaccggtgtgacacccgcttttttcagcagattgataatctcatcatacagcgccgttcccacatcccgctcaaagaaaaccaatggtacgccagtgagcatctccaggggaatgcccgttttgaggtatttcatcagcggatgatcatcatagaccgccagcataaatcgttctttaaacagcagttcatgaaccagattatccggcagttgcgtattgcgcattacaccgaagtcaatccggccgctcagcagcgggttaatctgctgtttggtattcatctgatgcatgtggatagccacatccgggtatatttcacggtactggcggaatgtcgccgtaatatgacgcataaacggggttgtggaagtgaagccgacagaaacttcccccagttccccgcgatccattctggctgctttttcaaccgctgcctcgacctgagtacggatttggtaagcttcacgcagaaacatttcgcccgccggggtcagactgacattccggttgttccgtgccagtaatttagccggaatcgcgttttcaagtgcctgaatctgctgactgagcggaggctgggagatattgagacgctccgctgcccgtccgaaatgcagctcttcagcgaccgcaatgaaataacgcagatggcggaattcgatcattattccctcattaggtcgtaaaacatatcaaacaagagtattaatatattagacaaaataccagcatctttttatgctcggtattattaccaaatgctgagataagtgtatgacagacgagaataaactgataactgacaaccgtgtgacctcaccggtgcagaatgatcaggcaaagcagcactatatccagcgcgacgacaaactgtatctgcgtgtcactctctctttctttatggtcggtctggcgacgtttgctctgctctattttgtacagccgatcctgccgttgttgtcagacgatttttcggtatcaccggcgcaggccagtttgtccctttctctggcgaccggattcatggccgtcgggctgctgatcaccggcccgctgtcagatgcggtcggacgtaaaaatgttatggtgatatccctgacatgcgcggcaatctttaccctgctcagtgcgtttaccaccagctgggcggggatcctggttgtccgctccctggtcggattatctctcagtggcgtcgccgccgtggccatgacctatctgagtgaggaaattcatcccagctatgttgccctgtctatggggctgtatatcagcggtaattctatcggcgggatgagcggacgcctgatcactggcgttattgcggattatgccagttggcggattgccgttctggtactgggaacattttctctgttcggtgcttttctgttctggcggttactgccgccgtcacgccatttcagagccagttcactgaaaccgaaaagcttgtggaaatacctgatcctgcactgccgtgatgatggtctgccgtggctgtttgccatcggttttatcattatgggcagctttgtcaccctgtttaactatatcggctaccggctgatggagccgccgtatcacttcagccaggccgttgtcggtatgttatcgatagtttatctgtcaggaacttacagtgcctcaaaagcaggcgcactgacacggaaatacggctacggcagagtactgattggtgcagtcacattaatgctgaccgggattctcattacgctcggcagttcactggcagcagttctgatcggtatgctggtactgacgacgggattttttgccgcccattccgtcaccagcagctgggtcggacgccgcgcccggcgcgccagagcccaggcatcctcactgtatctgttttgctattacggcggttccagcattgccggtactctgggcggtgttttctggtcttactggcactggaatggcatcggctggtttattgccgctatgctggcaaccggtgtgctgattgctctgtatctgaataagcacgctcactcatagtacataactaatacagtcaggtaattaatagttatgtcatataaaatacctcatcgggttaattgccggtcagcatacagatatgtaatctgcatatgtttcgcaacagtaaatgttcttgatccggtgaggttttatgataacacttatattgagcagtacactcttgttcagcaatctgtatcagtgtgatattaattaccctgagtcctgtgatatctggccgcctgtcggattaacagaaataacggagtaaatatttactgcgtaacaagcaccatggtattagcatcttcatatctataatttcctgtattgatttatttatatttttagcaccaccaatgaaaagttcattggtggtgctttttaattacctgctgagaaatctgataaaaataacgaaaataataatcacgtatttatatatcttacaagaaaaatacctaatccagttaattaccaccaggcaggatttacgttaatgttatcaggccaaacacactctcattcaccacaacagacgcatgcgaggttaatatgctgacactgatactgagcacttccctgtttacatatgatatctttcctcccggagacccgaaactaacgcagtcaccacaacctgaaaaagaattgataatataccgggaaaatacctgctcgctgtccaatccattttgctgaaatctgatacccggcagataatatattcattcctgataaactgaggtaactatgctgacacttttattaaccggaaccttattattctcatcagtggattcatttgagtcttgtgatatcgttgcaccggaatactgcccggttatatggggccattaaaaaaatcgatcttaaatgatggcagatatacacaagtaacttacttttatgaatcatgttaaggagtctttatgctgacacttattttaagtagctcacttatgattcacagctgttttccaaaatataatgcagatgaaataccaccagacctttggaaaccagcagaaatccactctgtttatgataactgcccaaagactaaggcttattgcagcaaaatataaaaatacagccgtatattattatcccatactaatgatgagcaatcatttttacgcacattaaccgtaaagggataatgcgacgttgatatacacccacaaactttgccgttaacccacgatgctgtgggttaacggtgaaaactaccatatgttcctgacacttcagtccctcccctcgtgccagacaaaatgtatttgtacaaggcacgatgctgagttaatatgataaaaacacttttgtatgttgtaactaaaatggtgatatatgcgatacgatgcaatgatttctctcaccgactgctttaatcagctggaatcggcactgaatacattatgcaaagctatccggctgcacccttcccggactgctgaggtttaccaacttcctgagatactgaaaggagaggaaaataacaccgtcaacaccatttctgtcattccggtcagtggcgagggtgctgtttcactggcactgtctcactatcagcgtttgtttatcttcgataatgatcaggaaatcagcagcaagtctgccatccggttgcctggtgtactgcttattacactctcccctgcacaacgaaaaataatgcagcaacagcttaatgaggttaacaggctgaaacagcaactggcctcaatcgtgacagaaacctccggtgtggacaaaacacagcgttttgaattcgtacacaatcagataaaaggattgattacactcaatgcctaccggcagatccagtcagtcacctccccttcctcagtccggtttggctgggccaataaacatattattcagaaggtggatcgcgatacattgttatctcagttggaagaacaatatcagaacccgcgcgccattcagtctctgacgcgtgaagaacggcaggtttatctggcgaaagagatttccgccttaaaacaggtgccggaagacgccatactcaaaatcaaacgaccggtaaaagtacagccaatcgccagagtctggtacagcgaagcgcaaaagcaggtgcagtatgcctgtgcatcgccgctgattgtattttgtgatgagaatgaggaaaaaccggtaacaggcgtactaccggattatgatgcggaaaacatcaaaatccgtcacagaccgaaagcaaagaaattaattccggtgatatcacgactgtatgtatatatggaagtaatgtaaaaacggagccatcagtggctccgttatcacgattcctgactgcggattacttcatgctgccgaccatatcttccggacgtacccatgcatcaaactcagcttctgtcagataacctaacttcatggcagaggctttcagggtcagaccttctttatgggcctttttcgcaatttcagcggctttgtcgtaaccgatgtgcgtattcagcgccgtaaccagcatcagtgattcattcagcagttggctgatccgctcgcggttcggttcgattccgaccgcacagtgctcattaaaactgcgcataccatcagccagcaggcggacagattgcaggaagttgtggatcaccatcggacggaacacgttcagttcaaaattacccgatgccccgccgatattaaccgccacatcattacccattacctgagcacacagcatcgtcatggcttcacattgtgtcgggttcactttacccggcatgatagaactgcccggttcgttttccggaatggcaatttcaccgatgccgcaacgcggaccggatgccagccagcggacatcattggcaattttcatcagtgaggctgccagccctttcagtgcgccatgggcatgaaccagtgcatcacaggtagccagcgcctcaaatttattcggtgccgtcacaaacggctgaccggagagttcagcaattttcttcgccacgcgaacagcatattccggatgagtattgagaccggtaccgaccgcagtgccccccagtgcaagctcactcagatgcggcaggctgttttccagatgtttcaggttatattgcagcattgccgcccagccggaaatctcctggcccagtgtcagcggtgtcgcatcctgtaagtgggtacggccgattttcacgatatcacggtaagcttccgctttcgcggccagaacactgtgcagggatttcagctcagggatcagctgtgtgctgaccgcaatcactgcagcgacatgcatcgctgtcgggaacacgtcgttagagctctggcttttgttcacatcatcattcggatgaacaatacgttcgccgccgcgcttcccgccgaggatttcactggcacggtttgccagcacctcattcatattcatattactctgtgtgccggagccggtctgccagattgccagcggaaactcttccggatgtttaccggcaagcacttcatccgctgcggcgatcaccgcatctgcccgctctttcgccagcagtcccagatcacagttgacagctgccgctgctttttttgtaatggccagcgcagcaatcagatccgcaggcattttttcaactgaaatacggaaatgctctaaagagcgctgggtctgagcgccccataatttgtccgcaggaacatcgatagggcccattgagtctttttcaatacgcgtggctgccattagtctctccttagcacacaaaataaaatggatttaaaatcccgaaagttacagatagactctgaaaacgggcctatcttgccatactttcatttccgattatgcgatccgggcggagttattgctttattgttactatcttattgttaactgtttaaaaagagagcgttgctatgttaaaaatgcagaatcaggtgcaattctatgattggggaagccataccgcgatgacagaaatgtacggttacccgaaccctgacaagcagccgatggccgaattatggatgggcgcccatccgaaagccagttcggtggtgacagacacccgcggcaacacctgctctttatatgattttattgccggtgacccgcagtccgcgctcggggatgaaattaaccgccgttttcaccggctgccgtttctgtttaaagtgctgagtgctgctcagccgctgtcggtacaggttcatccggataaagccgctgcagaggaaggatttgcccgcgaaaacaacgccgggatcccgctggattcaccggttcgtaattataaggatgataaccataagccggagctggtttatgcccttaccccattccgcgcaatgaatgcgttccgtccgctggccgatattgccggactgctcagtgaggtcgctccggcacatcctgccattgaacgttttattgcctcgccgtcagaggagcatctgtctgttctgtttacccgtctgctcaccatgagcggagacaccaaagagcgggcagtcgctgtactgaaatccgcactgaacagccgtcagggtgaaccgtgggataccatccgtaagatgacagagttttatcctgacgataatggccttttcaccccgcttctgctcaatgttgttgaattaaagcccggtgaggcaatgttcctgtatgcccgcacacctcatgcgtatcttgaaggaactgcgctggaagtgatggctaactcggataatgtgttacgcgccggtctgacacaaaaacatattgatgtcggtgaattgctgaataaccttgattttgtaccgaaacacgcaaaaagtttatttatgcagccggaacatattaacaacactgaaattttcccgattccggttgatgatttttctttttcggtgatgaaattgcataatcaggaaatgattcttgagaataacagtgctaatattcttttttgtgtggaaggtcatgcagttatcactacggaaacagaacaattaagagttatctcaggtgaatctgtttttctttctgctatagaaagaaagtttaaaatagatggtgaaggaatcattgcccgcgtttataatgctgtgtaagtaacttctctaattttctccgggcagtccgccattgaactgcccgttaattttgataccgtgcgaaaacctgcaaaataaatcgcatataaaggatggattgatctatgaaaaagtcgttagttgctgttggcgttattgtcgcattaggcgccgcatggggtgtagcttcatggcagacaggtaagaaaattgaagcaaaccttgatgagtatatcgccaaagcgaataaagcaatcaaggacaactaccctgatgcacctgtcacgctgaccgccaaagatttttcacgcggtattttcagctctgatgtcaaactgatcatcaaagaaacgaaaaaaagcggtgatacctccggcgaagaacttgtgatcctcaatactatcgatcacggtccgttcccgttatctcagcttaagagtatggtgttctcgccaaatatggctgctatccactctgagctggaaaacaatgacatcaccaaacaagccttcgaaatcaccggcggtaaatccccggttgcaacggatacccgtatcagctacgaccagagtttcgatattgatcttgctgtcagcaaaatcaactataagaaagacggtgaagagctggcattctccggtgctgatctgaacgttaaattcgacaaagaattcaaaaacgtcaaaggtaaaggcagcagcaatgaactgacttaccgtaaaggcgatcgcgaaagtatcgtgatgaaaggcctgtcatttgacagcgatgttgccaaatccggtgacagctacttctacctgggtgaccagaatctgagcctgaaagagttagcggtcgttaattacagcgataccgtttctctgaaagatctgaaactgaacggcacctccggcagtaaagataacaaactgactgcagatgttgattacagcctgggttcactgagctaccgtgatatcgatctcggcgctatcagcctgaaaggttctctgaaagatctggatgccacttccgcgaatacgctgatggcatctgttgaagagtacaccaaactgtctgagtctatgtacaccgaagatttcgacgatgcgaaaatggaagcactggatgagaaaatgaaatccaatgcactgggtctgttcaagtacagcccgtccttcgctatcgcacctctgagctggaaaaacagcggcggtgagtcaaaagttaacctgaacgtgaccttcaacgcactgaacgaagagagctttaaagcactggaacacgcaggcagctttgagaaagttctgccggttctggtgaaagagttcgggttcaatatggatctgtccaaaccgatgctgactgatttcgttgcagttgccatgcagtcacagggtatgggcgcgaaagaagccaaagaacagggtgaacagggtgttgctcagatggccagcatgggtgccatgatggaaatcgtgaaagtgaccgataaagcgatcaccatggatctgaaatacagcaacaacaacatcgatttcaacggtaaaaaattcaccgttgctgaattcctggaaaaatatgaccagtacggcgcactgagcgataacagcggcgacgacgaaggttacgaggaagaagcaatcgaaatggatcctaacggtgatgttactgaagacgtgactatcggtgaagaaccggctgctgacgttgcggctcctgctgctcagtaatttcacactgttattatctgttgatcagacaaaagccagtcgtcagactggctttttatcatctgaggaataccacaatgattaaccgctcacttcccctgaccgacctgcaccgccatctcgatggtaatatccgcctgtccaccattctggatctggcccgtcagcacaatttgccgctgcccgcttatgagactgaaaccctgcgcccgcatgtgcaggtgatgagcaatgaaccggatctggtgcagtttctgagtaagctggactggggtgtttccgtgctggcagacctcgatgcctgccgccgtgtggccgctgaaaacgtgcaggatgccgtcagtgccgggctggattacgccgaacttcgcttttccccttactatatggcgatgaaacaccatctgcccgttgaaggcgtggtggaagcggtactggatggtgtggcgtccgaagtccgcaacagcccggtacggattaatatgattggtattctgagccggacattcggtacagatgcctgtcatgaagagctgaatgccctgctcgctcaccatgagcggattgtggcactggatattgccggtgatgaatccggttatccgggcgatttattcaccgatcatttccgcaaagcccgtgacgtcaactgggccatcaccgcccatgccggagaagccgccggcgccgccagtatctggcaggctatccgcaacctgggtgcacagcgcatcggtcacggtgtgatggcgattgaagacccggcgctgatggattacctggcagagcaccgcatcggtatggaatcctgcctgacctcgaatattcagaccagcaccgtgccgtcactggccgcgcatccgctgaaacagttcctggcacacggcattgccgctaccatcaacaccgatgacccggcggttgagggtattgagattgcccatgaatacaatgttgctgccccggcagccggtctgacacaggcagaaattgaacaggctcagattaacgggctggaaatagcctttttatccgcagaggaaaaagcggcactgagagaaatggcagcaaaacgcggccagtaagcgccattccggtaaaaaaaagccgtggcattctttgccacggcttttttatgtcttttaccagcacccggaagcaccgccaccaccactgctgccgcctccgccaccggacgatccgctgcttccggaactaccgccggaactgctgctgtaactgccactatcagaaccggatgaatacccgcctcctgtacctgctatgacaccggttaatttccgtatttccgcttcctgagtaagatattccggaattaatgtatataacaaataacaaataaatagtgagccaaatacattaagaaaaatgagcatcattatactgatgaacaacgcatcaggatcaggatctccgtctatcagaacccgtgtcattataaaaatcagaactgaataaaataatacgttcacagtatggccgagcggtgtcggataaatatacttatactgcaaaaatgccgtcaggcgtttctgcgcaaggcggattatccgttcaggctgacgttttttcttgtttttggatttcgcgtattcttctctcagatattcaatatcgttaagaacctgcttttctatccttttcttacggcggggagaaccaataaataatgaccagagatacaccgtaataaaggtcagaagataaataatcgtcagtcgtttgagttttaatgcttctgttccggatgtctctgatttgatatattccggttcatttccgctgataatatcaatggcatcggtcacacccgcttcaattccggtaaaataatggccttttttaaattcaggggtgatacgctgacggataatacggcctgcggagacatccggcagaataccttccagtccatagccgacctcaaaacgcaaattacggtcattcaccgccacgaccagcaacagtccgttattctgacctttgcggccgatcttccatgtattaaacgcacggtgcgcaaatgtctcaatactttctccgccggttgacggcacaataaacaccacgaactggctgccgtcattgcggctcagttcatactcaatgagttgccggttaagctgtgttaattgagagccggtcagaagaccggcgctgtcaataacccgttcccgtttcagttccggcagagcctgcacatccgcacgggcaaagaaactgacaaaaagaagtatcaggcatcctgccataaccctgctcataattactcctgtgaatgttctttcccctgccgcgcatagcgcgccgccatcaccgcacacaccatcagctggatctgatgaaacagcatcagcggcagcaccagaattcccaccacggccggcggaaacataacgtttgccatcggcacgccgtttgccaggcttttcttcgaaccacagaatacaatggtaatttcatcggccttattaaagccgagtgcccgtgagccgtacacgttgatcaccagcacaatcgccagcaacccgcacgacaccaccgcaatctgcagaatagacattgcatcaatcttctgccagatcccctcggcaaccgcttcgctgaaagcgacatacaccaccagcaaaatagaggtgcgatctgttttattaatgatttttttattgcgatccacccacttgccaatcagcggacgggaaaaatgaccgaccacaaacggcagcatcagctgcaataaaatagagcggatagcacccagggtatccagttcatgcgcgccctgcgtttccatcataaaaccgataatgaccggtgataagaacacaccaaggatactggaggcggatgcactgcaaatcgccgccgccacatttccgcccgcgacagaggtaaaggcgatagccgattgtactgtcgccggtaaggcacataagtataagaaacccatgtaaatggtcggagacatccattccggtaccaggaactgtaaacccagccccagcagcgggaagaggataaaagtactggagaacaccatcagatgcagacgccagtgccccatccctgtcacaatcgcttcccgagagagttttgcgccgtggaagaagaacaataacgcaatcgcggcggtggtcagatagcggaatccggtcgccacactgccggttgccggaaagagtgacgccaaaataacaaccgtgatcattatgaccaggaacggatctaaccgcagtttctgccaccagtttgtcatgcgttattcacttttgtctgcaataagaagtaatgactatttgttacagtgtcacagtccgtccggttttatgcgattccataccggcctctataatacggataacttctgccccttcctgcgcagtcaccgggttcggaccgttattgataatcgcctctgccacttccgcgtaatagcggccatagtgcccggctttgttcggatacgtttctgtgatcacttcaataccatccggtgacaggctcagttccccgtcgcggctgtcatgaccccagttgacaccgaccggcatctgccctgctttcagtgcattttcctgcggatccagtccgtacttcacatagctgcctttcatgccgtgaacgatatacaccggggattccgctgccgcgaccgtggtggcatgcagcacgactttgacatccggatagtgcagttgcgcatggaaataatccaccgcctcagaacccggacggatcatccccaggtcggcagtgatcgccgttggttttccgaaaaactgcagtgcctggtcaatcagatgagaacccaggtcataccagataccactgcctaatgcagcagcttcgcgccagcgcttttgcggctgcgggcggtagcggtcaaaatggacttcaaaatatttgatagccccgagttttttactgtcaaacagggatttgagcgtcagatacccggagtcaaaacggcggttatgataaacagacagcaccagtccggcgtcatccgcctgttttgccagggtaaatgcctcttccgatgtcagggtaaagggcttatccaccaccacatgtttacccgcagccagcgccatccgcgccagcgggaaatgggtgtcattcggggtcgggatcacgacgaggtcaatggccgggtcagcaaaaatatcttccggtgtggcgacaacctgcacatccggataatccgcatgcactttggcggcatcactgctcgcgactttggccagttccatattggcattattgacaataaacggcgcatggaatgtttttccggcaaaaccgtacccgatcaggcccactttcagtattttcgtcatcactccctccgggggattgtcatgttaacggataaaaacatgctttcagaatctgtcatcctcctgaaaagtaccactaactgattccgtgacgcaaatgctgtgcccggttttcatcagttttgccgctttttcattctgatacacacagttatccgcgctttcacacaatcccgataaccccggatgcccggggattgctattattcaccccgcttaccggggatcccggttttttatgtgctttatttgtatgtttttaaagactcgctttgggcattgtaatggctgactacttattactttttgtcgggacggtgctggttaacaacttcgtactcgtcaaattcttaggattatgcccctttatgggggtctccaaaaaactggaaaccgcgattggcatggggtttgccaccacatttgtgatgacactcgcctccgtctgctcgtggctgatggatacctttatcctgatcccgctggatattctctatctgcgcacactgagctttatcctggtgatcgccgtggtggtgcagttcaccgaaatggtggtgcggaaaaccagcccggcgctctaccggctgctcgggatcttcctgccgttgatcaccaccaactgtgcggtactcggtgtggcgctgctgaacataaacctgtcgcataatttcctgcaatccgccgtttacggctttggtgcggcagccggtttctccctggtgatggtgctgtttgccgctatccgtgagcggctggcaacggcagatgtgccggcgcctttccgcggggcgtctgtcgggctggtcacggccggtctgatgtctctggcctttatgggcttcagtggtctggtgaaattctgatgacaatgatttggattgccgttgccgtactcagcctgctgggtctggcattcggtctgatacttggttacgcctcccgccgcttcaaagtggaggaagatcccattgtggataaaattgatgacattctgccgcagagtcagtgcggccagtgcggttttcccggctgccgcccgtatgcggaatctgttgccaatggcggcgcaataaaccgctgtgcccccggcggcgagcaggtgatgctgaaactggcggatatgctgggtgtggatccgcagccgctcgacggtgacgagtccgtactcaatccggtgcgtaaagtggcctttattcatgaagaccagtgcatcggctgcaccaaatgtattcaggcgtgcccggtggatgcgattatcggtgccacccgcgccatgcacactgtggttgaaaatctctgcaccgggtgtgatttgtgtgtcgcaccctgcccgacagattgcattgagatgatcccggtcgccgtcaccccgcgtaactggaagtgggatttaaacaccattccggtcagaaatattccggcggataccggcggtactcctgtcaaacctgttcagattgaggcgtcgtaagttttatgttcaatttgctcaactttctgaaaaaagaccgggtatgggattttgacggcggcattcatccgccggaaatgaaattacagtccagccggacaccgatgcgggtgtgcccggtaccggaagaactgattattccgctccagcagcatatcgggaacgaaggcgatgtgctggtcagccccggcgaccatgtcctgaaaggtcagccgctgacacgcggaaccggccgcagcctgccggtgcacgcctcatcatccggcacggtgactgccgtggagccttgtgtgaccgcgcatccgtccgggctgaccgcgccgtgcatccgtatccggactgacgggctggataccccgtacccggcggaaaaaacaacggattttacctctctttccaaaacagagctgactgaccgcattcatcaggccgggattgccggtctcggcggcgcaggcttcccgaccgccagcaagctgaaaggcggcggtgatcttatccgcactctgattatcaatgcggcggaatgtgagccctatatcacggcggatgaccgtctgatgcaggaacatgccggggaaattctcaccggtatccgtattctgatgcaccttcttgagccggaacaggtgcttatcggcattgaagataataaaccggaggcgattgccgcactgcgtgacgttactgccggggaaaaacagattttcgtgcgggtgatcccgaccaagtacccgtccggcggcgccaaacagctgaccaaaattctcaccggccgcgaagtaccatccggcggacgctcttctgatatcggcgtgctgatgcagaacgtcggaactgtggttgccatcaagcgcgccattaccgacggcgaaccgctgatccagcgcgtggtaacagtaaccggcgaagcggttgaatcaccgggtaacttctggacacgactcggtacgccggtccgtttcctgttgcaacaggccggtttccgtcctcagcatgaacaaatggttgtgatgggcggcccgctgatgggctttacactgccggatctcgatgtgccggtagtaaaaatctgtaactgcattcttgcaccaaccacgaacgagatggaaccagctgcaccggaagaagcctgtatccgctgcagtcactgtgcggatgcctgtccggccggattactgccgcagcagctctactggttcagtaaaggtaatgaacacgaaaaagcagaacagcaccatctgtttgactgcattgaatgcggtgcctgtgcctgggtctgcccgagcaatattccgctggtgcagtattaccgtcaggaaaaagcacaggtcattgagatccgcgaagaagcccaacgcgccgcagatgccaaaatccgctttgaagccaaacaggcacgaatggcacgggaaaaagaagcccgtgaagcccgccataaaagcgcggctgttcaggtggatgagaaagacagtgcggctatcagcgccgcccttgcccgcgtgaaagccaaagacagcaatgcagggatgacgatttctgttaatccgtccgttttaccggataacagcgccgtgattgctgcccgcgaagtccgtaaagcacaggcccgcgcacgtcaggcagaaaaagcggctctcgcggctgaaacaacacaaccggcgacagaagcagacgccgatccgcgtaaagccgcagtggctgccgcccttgcccgcgccaaagcgaagaaagtcgctcaggctgccgaagctccggcggaagctgcacaaccggcagcggaaacagacacagatccgcgcaaagctgctgttgctgccgccattgcccgcgccaaagcgaagaaagccgctcaggccgcagaagctccggcggaagctgctcaaccagccgcagacgcagagacagatccgcgcaaagctgctgttgctgccgccattgcccgcgccaaagcgaagaaagccgctcaggctgccgaagctccggcggaagctgctcaaccagccgcagacgcagaaacggatccgcgcaaagccgctgttgctgccgccattgcccgcgccaaagcgaagaaagccgctcagactgctgaagctccggcggaagctgctcaaccagccgcagacgcagagacagatccgcgcaaagccgctgttgctgccgccattgcccgtgctaaagcgaaaaaagccgctcagactgctgaagctccggcggaagctgctcaaccggcagcggaagcagagacagatccgcgcaaagctgctgttgctgccgcgattgcccgcgccaaagcgaaaaaagccgctcaggccgctgcacaacattctgaagaaaccactgattaatgaagcgaaataagcatgaaatttaggcccgtttcctcaaacgccccgcaccggctgaaaattgcgggatcaccgtttacgcataaccgtgacaacacctccgccatcatgctgtgggtggtgattgccatgatcccgggaattgccgcgcagctctggtttttcggcgcaggtaccctgtttcagattctgattgcagttgtcactgcgctggtcaccgaaagtattgctgtccggctgcgcaatcagcctgtgatgccgtatctgaaagataactctgcgctggtcactgcagtgctgctggctgtcagtattccgccgctggcgccgtggtggatgattgttatcggtacattctttgccgtgattattgccaagcacatatatggcggtctcggacaaaacccgtttaacccggcaatggtcggttatgtggtgctgctgatctccttcccggtacagatgaccagttggctgccgccggagagtctgcaaatcaccccggtttcgctcagtgacagtctgcatgtgattttcaccgggttatcagacggtggccagacactggagcagttacgcgccggagcggatggtatgagccaggcgactccgctcgacagtttcaaaaccggtctgctgacccgcgatatgtccgaaatcctgacacaacccgttttacagggctctgtcgccggtatcggctggcagtgggtgaatatcggttacctgatcggcggctgtattctgcttaaccgtaaagtgatttcatggcagatcccggccgccatgctggtaacactcgcggtattgtcagtgatcggatacctgattgattcatcacactttacatccccggttatacagctgttttccggtgccaccatgctcggggcattctttatcgctaccgacccggtcaccgcttccaccacaccacgcggccgcctgatatacgggatactgatcggccttctgctgtggattatccgtgtttacggcggttatccggatgcggtggcatttgccgtcctgctggccaatatcaccgtgccgctgatcgatacctacacacaaccgcgtgtttacgggcacaaacgggggaataaatgattgccacattacgccgttacggcctgatcctcgccctgtttgccgccggtaccaccgggctgagcgggtttgtctacaccctgacaaaaccggaaattgataagcaggccgccgcacagcaaaaggcactgtttgccgaaatcctgccggaatcggtttataataatgatgtgattgcagagtgttatctggtcaccgatcctgccctgggtaatgaactgccgcaccggctgtatgttgcccgcaaagacggcacacctgtcgccgcagtgctggagtccaccgcaccggacggctattccggtaatattcagctgctggttgcggctgattttaaccgtaccgtgctcggctcccgcgtgaccgaacacaaagagacaccggggctgggtgataaaattgatacccggatttccgactggatcacctctctgagcggcaaacacattgaatccgctgatgacccgcactgggcagtgaaaaaagacggcggggattttgatcagttcaccggtgccaccatcacgccgcgcgcagtcgtcaatgctgtccgtgcaacagcggattatatgcagacactgccgccgttgctgaacaccttacctcaatgcggagcagaataatgagtcagattaaagagttattcgccgacggattatggaaaaacaactctgccctggttcaggtactggggctgtgtccgctgctggcggtttcctccacggtcaccaatgcgctgggtctgggactggccaccaccctggtgctgatttgtactaacgtggcggtttccgcactgcgccgctggatcccgtcagaaatccgcattcctatttatgtgatgctgattgcctccgtcgtgactgcggttcagttactgattaacgcctatgctttcggcttatatcagtcgctcggtatcttcatcccgctgattgtgaccaactgtattgtcatcggccgtgccgaagcgtttgctgccaaaaatgccgtttacccttctgcgattgacggcctggctatggggctcggtgcgaccgccgcgctgtttgtgctcggtgccatgcgtgaaattctcggtaacggcactctgtttgacggtgcggatctgctgctcggtgactgggccaaagtgctgcgcgtcgatgtgctgcatcttgacaccccgttcctgctggctatgctgccaccgggtgcctttatcgggcttggcttaatgctggcaggcaagtatcttattgatgagaaaatgaaaaaacgcaaaaatgcacctgccgctccgcaatatgaaactgaaaaaggatgcggaagccatctggtcaaataactgtataattaagcaggctcctctccgggaggctgcttttatcatgaatgagccaatgtcgttatgaataaagaaaaacgtattgaaatcctgacccgcctgcgggacaacaacccgcaacccaccactgaactgctgtttgattctccgtttgaattactgatctccgtcttattatccgcccaggcgacagatgtcagtgtcaataaagccacccgtccgctgtatgccgttgccaatacgccgcaggccattctggatctgggtgtggacggtgtgaaatcctatattaaaaccatcgggttatttaataccaaagcagaaaatgtgattaaaacctgccggatgctggttgagctgcataacggcgaagtgccggaagacagagctgctcttgaggcgctgccgggtgtggggcgcaaaactgccaatgtggtgctcaatactgcgttcggctggccgaccattgctgttgatacccatattttccgtgtctgtaaccgcacaaaatttgcccccggtaaaaatgtggatgaggtggaacaaaaattattgcgggttgttccggcagaatttaaagtcgactgccaccattggtttatactgcacgggcgttatacctgtgttgcccgcaaaccccgctgcggttcatgcatcattgaggatttgtgtgaattcagcgaaaaagtgtatccggaagattaatctgctgcgctttaaacagaaattgccctctgtgcttgcgggcagcgtaaattcgcgtaaaaataaccataaatttgctcacccaaccagtacgggaacctatgtttcaagataacccgctattagctcagctaaaacaacagctccacgataaaacattgcgtgtcgaagggatcgtaaaaagtaccgataaaggctacggtttcctggaagttgacggacaaaaatcctattttattccgccgccgcagatgaaaaaagtcatgcacggcgaccgcgtcaccgcagctattcacacggtgaataataaagatgtggctgagcctgaagcgctgatcaccccgtttctggaccggtttgtcggccgtgtgcagcgcaaggaaaatgatgaccgtctctggatcattcctgatcatccgctgttaaaagattccattccctgccgtccggcaaaaggcgttgatcatgagtttcgtcagggtgactgggcagttgcggaaatgcgccgccacccgctgaaaggtgatcgcagcttccacgcggaaatcaccggctttatcaccgatgcggacgaccattacgcgccgtggtgggtgacactgacccgccaccagcacgcactgaaagagccggagccggttgaggtaaccatggcggatgataatctgccgcgtactgatctgacccatctggattttgtcactatcgacagcgcatccaccgaagatatggatgatgcactttacatcactaccggtgataacaatcagcttcagctgactatcgcgattgcggacccgaccagctacatcccggccggcagcgagctggacgctattgcccataaacgcgcatttaccaactatctgccgggctttaatatcccgatgctgccgcgtaacctgtctgatgacctgtgctcgctgcatccgcatgtgcgccgcccggcactggtgtgtcaggtctccgttaatgaggatggctctctgtctgatgatgccgtattcttcgccgcctgggttgaatccaaagccaagctggcttacgacgatgtttccgacctgctggaaggtgtggctgaccgcgtgacgccggatgaaactatccgccgtcagatttccctgttgcaggatatgtatcagcgccgccatcactggcgtgaaactcatgcgctggtctttaaagatcgtcctgattaccgctttatccttgatgaaaacggcgtagtgacggatatcgtggctgaacagcgccgcagtgccaaccgcattgtggaagaagcgatgatcaccgccaatatctgtgccgcacaagtgctggataaaaaactcggctttggtgtctataacgtgcacaccgggctggatccgctgaccatcagtcaggccgttgccctgctcgccgaaaacggtattaacttcagcgctgaagaattactgactctcgacggtttctgtcgtctgcgccgtgaactggataatcagccgacacagttcctcgacagccgtatccgccgcttccagacctttgccgaagtccgcatggaaaaaggcccgcactttggtctgggactggatggctatgcaacctggacatcccctattcgtaaatacagcgatattgtgaaccaccgtctgctgaaagcgattatcgccggtcagtctgcggaaaaaccagctgaagccctggccgagcacctggcagagcgccgccgtgccaaccgtatggcagagcgtgatgtcggtgactggttatatgcccgttatctgcagccgtatgccggtacagataccccgttcccggctgagatcattgatatcacccgcggtggcgtgcgtgtccgtctgacagacaacggcgcggtcgcctttatccccggcacctttattcacccggtcaaagatgagctccagtgcagccaggaaaccggctcagtgctgattaaaggtgaagtacgttaccgcctcaatgacatcattccggtgaaaattgaggaagttaagatggaaacccgcagtattctggcccgcccactctgatccggaatcactgactgataagaaccgccgttttgtattaacggcggtttttttattcctgccactcagaacccgccgctgttcctgtcattaaatcccggacattaatacctttatcagcatttaaattttatttaaatcatgaggatagtaattagtaacgtgattgctatagtgatgataatcagacattcagcggggaaatgagatgaagaaaatagtaacggcattgcttgttgctggtggcctgctggcactcagcggctgtaagaacctgtcagagcaggagaaagataccgcaattggtgctgagttaggtgctatcagcggcgcgatcctgacggatggttccggtctgggtacagtgggtggtgctgccgtcggcgggattatcggccacgaggccggtcagtgacaaaggcgtccgcaacggacgccttatctctctgtcagccgcctgccagtttgactttaaagcctttctcttccagcagttgcttcagtaaatcgcgtttatcaccctgaatttcaattacaccatctttcagcgccccgccgcagccgcagcgttttttcagatctgccgccagcttgctcagtgcagcatcatccaaatcaataccggtgatcaggcacacacccttacctttacggccgctggtctgacgctgaatacggacaataccgtcacctttcgggcgttccgctttgacttccggctcatcaatacggccggcatctgtggaataaaccaggcgtgaattattgtccatcttataatactcccactgaagcattaatcgcctgtaatgccgcctgcgggttatcactgcgggtgattggccgcccgataaccatgtaatccaccccggcactgactgcctgcggtggtgtcatgatacgccgctggtcaccggcatcactgccttcagggcggatccccggcgtgaccagtttaaattcccggcccagggtctctttcatcagtttcgcttcatgagcagaacagaccacaccatccagcccgcagttctgtgttaattttgccagacgcagcgcgtgctctgccggtgtggcatcaataccggttccggccaggtcggattgctccatgctggtcagcacagttaccgcgatcagcagcggcgcatcgttaccgtacggcagcagaatctctttcgctgctgtcatcatacgttcgccgcctgccgcatggacgttaaccatccacacacccagctcagccgctgcccgaaccgcatgcgccgcggtattcggaatatcatggaatttcaggtcaagaaagacctcaaacccgcgctgctgcagtgcgcggacacattccggcccgcagaaggtaaacagctctttaccgactttcagacggcactgtgccggatcgatacggtcggcaaaagccagcgcgtcatccgggttgtcgtaatcgagcgcaacaataacaggcgatgcgatatctgcacggcctgtatgcgaagaaagagatgtcatgaatgtattacctgtggttggtgaattaatacgggtaaataattacgggtaaatgtgacgttgtcattgtccgtccagccctctgataggcttgatagtatcccatgaccggcaggacgggcagtgccagtacagggcgtgtgatgtaaatccgcatttgccgcagcggtaatccggttttgtccggatttgttcgccgaccatgttacgcagcaggccgagactctctttggcacgcccttcctccgcctctgacagataatattccatcagacggcagaacagacgcatggtcggatggcgctgcaactggcggttaacataggtgatcgccatttccggcccttcctgctgttcaataatatccgcaagatagagttcggcaatagcgccaatattttcatccgaacagtgcagcaggtattctgcccattctgccggctgatcaaggtgcgtgtagcaggtttccagcattggcagtgtttcactgaccatttctttatcctgctcaaacacccgcttgagcacggtaacggctttgctgtattccgcccgttcaatatgaatgcgcccctgcataatcgacacccgggcacagtttttatccgcccccgccgctttggcaagatacgcaaatgccccgtcagtgttatcgctgcccagcgcctgcaatgccagctcacaatagaaattagcgatattctcccgctgcccgctatcaccctgtttcagcagcttttcaccgatatcgatagctttgctccagtcactggtggactgatagatcgataacagcgactggagtgcactttgtctgaaatccgcctcatcaatcagctgtaaaaacaggacttccgcccggtcatagaccccggcggccacataatcgcggcccagctgttgtgtggcgaggagacgctggtcataggagagagaggcgctttccatcagcgactgatggatgcggatggcacgttccacttcgccgcgcgaacggaacaggttgccgagtgtcaggtgagcttcaaatgcagagctgtcttctttcagcatgtcgaggaacaaatcaaccgctttatcctgctgatcggacagcaaaaagtttacgcctgccacatagtcgcgtgacaggcggtcagcatgttgttgttgattctgctgcgcgctgcgccgccccatataccagccgtatgcggcagcaatgggcaacagaagaaacaacagctcaagcataatgcttattccttagtggtgtcccgcagtgcaaccgaaccggaagactgcaccgtctggtcagcttccagacgtttgatccggtgccgggcacgggccagcgacaaccgcagacgtaaataaaacagaccgcagacaatccagcccagcacaaaaccgataccgaacagtacggccagcaaggtggatacagaatactgtccctgcgcaatcagataattaaatgtgactacctgatcgttatttgcgcccagtgtcaccgaaatgatgaaaaccaccagtacaaggataaaaatcagaaaatatttcaccggcgttcctattatcaggcttgcattccgcgcctgcttcttgcagacgcactaaccccttaagttaccatttaccccggggagaatgaaagtaatttgttgtgttcccgagttttttccgcttttttgccggtatccgcacagaataccggcaacgggtttcacgcgccttataataacatgatttcaggtcagcggcggcggttgcacaccattttccttctgtctgttaagccagataaagaatattccggccaggattgcgttaataatcacagacataatgatatctgacggccagtgcatccccagcgccaggcggctgtattccgccagaatgccccacagcagaatcacgcccgccagcccgcggcggccctgtgcggtaaaaaacacaaagagtatcagcgcccacgcactggcaaacagtgcatgaccggatggaaacgcataaccggtttcacttttccagtgtttcagcagccagccgggcacctgataatgatttttcacggtattttccagcagttgtgcccgtgctttccgggaaaggtcatagaaccctttttctgacacaatatgttgctgtgtcagccagaccacatacgggcgcggctctttaatggtgtttttcatcgccactttgataccctgtccggcagccaccaccaccaggatcagtgctgctgcacgcagtgcctgctttctgctgccgcgaaacaaacggacaaacagaatacaaaaaatgagtgatacgataatggccagcggatatgccgcggtatctgtcaggtgccacaggccgcgcagcaggtcatcatcacctgatggctgccagcgccagccggtcagtaatgtcaccagcggtaccagcatcagtaatatgacaccggcgataaagggttttgtcaggtttttcatccgggttgaatcattccgttaaaaataaatattatttttgtcaaactgatgtactactatggtcatgttcagttatttgacccgcaaatggaatgtcagtttcatttcccgggcaacgcagataataacatcgccaatacgattatgtgcgtttaaataaagatatttatatcaatgagttaataaatcatgaataaagagttgcagttaaaacgtgtcgcacaggcaaaattacctaccccgttcggggaatttttgatggtcggatttgaagaaattgccaccggtcacgatcacgtggctctggtgttcggggacatcagcggtgatgagccggtgttatcccgtgtccattcagaatgtttaaccggtgacgcgctgttcagcctgcgctgtgactgtggtttccagctggaagctgctctgaaacaaatctcggaagaaggtcgtggtgtattactgtatcaccgtcaggaaggccgtaatattggcctgctgaataaaatccgcgcctatgcattacaggataccgggctggatactgttgaagccaaccagaagctgggttttgccccggatgagcgcgatttcacattgtgcgccgatatgtacaaactgctggatgtgcacgccatccgcctgctgaccaataacccggaaaaagtcgagattctgacccaggccgggattaacattactgaacgcgtgccgctgattgtcggccgtaatccggctaatgcccattatctggataccaaagcggagaaaatgggacacatgctgtgccagtctccgggctgtaatcactgatccacctgcaaaagtcagtaaaaacagaaaagcgcggcaaatgccgcgctttgtttttacctgtctgaatacgttacgccagcatctgccggatcacatagcagaggatgccgccgtggcggtaatattccagctccgtctgtgtgtcgatacggcacagcgcattcagttcagtcacacgtccgtccgcatgtgtgattttcaccggtacaatctgttttggtgtgacactgttcaggccgccgacatcaatcagttcatccccggtcagccccagcgtacggcgatcggttcccgccggaaactccagcggcaggatccccataccaatcaggttagaacggtggatccgctcataggattccgtcagcaccactctcacacccagaagattagtgcctttcgctgcccagtcacggctggatccggagccgtactcttttccggctatcaccaccagcggtgtccctgattcctgataacgcattgcggcatcaaagatagccagtgtttccccggacggaatatggcgggtaaatccgccctccgtgcccggcaccatttcattgcggatacggatattggcaaacgtgccgcgcaccatcacttcatggttaccgcgccgtgagccgtaggagttaaaatccgccggtttcacgccgtgtgcctgtaaatagcgccccgccgggctgtctgctttgatgttccccgccggagagatatggtcagtggtgacagaatcaccgaggatcgccagaatccgcgcctgttttacatctttgaccggcgccggggaaaccggcattccctcaaaatacggcggatgacggatataggtggaatccggctgccactggtaagtcggggtattttccaccggcagtgactgccactgctcatcaccgtcaaacactgccgaatactctttgcggaacatctctgttttcactttttccactgcggcagcaattgcggcattatccggccagatatcttttaacagtaccggcttgccctgtttgtcataacccagcggatcggtttccagattacagtgcagattgcctgccagtgcataagccaccaccagcggcggagaagccagccagttggttttcaccagcggatggatgcgcccttcaaagttgcggttgccggacagcacggcaccgactgtcaggtcattctctttgatggcggtttcgatttccgcatccagcggcccggagttgccgatgcaggtagtacaaccataaccgacaagattgaatcccagctgatccagatacggcgtgaatccggcggcattcaggtaatctgtcaccactttcgaaccgggggccagagaggttttcacccacggttttcgggtcagccctttttcagcggcattttttgccagcagaccggcggtcatcagcacaccggggttggaggtgttggtacaggatgtgatagcggcaatcaccacggcaccatcctcaagggtaaaatcgtcgccatgcagagaaacaggcactttcgccgccggggactttttgttcagttccagatcaaccgccgcctgaaacgcgcccggtacctgcgccagcaccactctgtcctgcggacgtttcggcccggccagactggtctgcacatccgccagatccagcgccagcccggaggtaaagcgcggctcatccccctcgtgacgccacaatccctgcgctttgcagtacgtttccaccagtgcgatttcgtcatcactacgcccggtcagacgcatataactgagtgtgacctcatccgccgggaagaaaccacaggttgcaccgtattccggtgccatattggcaatcgtggcgcggtcagccagcggcaactgcgccagaccgtcaccccagaattcaacaaatttgcccaccacgccgtgtttgcgcagcatttgtgtcacagtcagtaccaggtcagtagcggtgatcccttcgcgcagacggccggtcagtttaaacccgaccacatccgggatcagcattgacaccggctgtccgagcatcgcggcttccgcttcaataccgcccacgccccagcccagcacgccgaggccgttaatcatggtggtgtgggaatctgtcccgaccagggtatccggataagcataggttttaccgtcgcgggtttcataccagactgatttcccgaggtactcgaggttgacctgatggcagatccccgttcccggcggaaccacacggaagcggtcaaaggcctgttgtccccagcgcagaaagcggtaacgctcgttattacgtgacatttcaatggccacgttatcagcaaaagcctgctcactggcatattcatccaccatcaccgagtggtcgataaccagatcgaccggcgacaacggattgaccttactctcttctccgcccagcacgcggatagcctggcgcatcgccgccagatccaccaccgccggcacaccggtaaaatcctgcatcagcacacgggcgggccggaaggcaatttcatggtcagcggtgccggttttctgccagtcgatcagcgcctgtaaatcgcgcacctgtacgctgtcgccatcgagattacgcaacaggttttcggccagcactttcagggatttgggaagtttatcaagattgccgagctgttccgccaggcgggagagatgatagatatggtagtgttttccacccgctgtcagcagggtttcacactgttgctttaaggttaacgacataacgcctccacacagagtgtacgggttaaacaggtatcttccttattattttcattataaagataccatattcccgtaatctttgcgggggcagccacacaatttgttaattcaatgtaaccaaaactaacaattttgcaggataattaatccggactgtattctgtaataacccgggttccctgcccgtcattctcaaatgagatggtatcctgaccgccgttaaataactgcgttaccgtcaggtgattattgccccgccatttgtattccagactgaccgtatcaccataatctgtgaaagactgatccgtgccgggtgtcagtttttccgtcagattctttggctctccggttgtgttgcggtagatcccgtaagtttgtaccagattgctgcctttgtagtagcattcatccgttgaatcatagctttccgggtcacgcacggtctctttacagaccggtgccgccggtacggatgcagatacaaccgccggcaacagcccggcggcaagcaggacagcgcctgtcagtgcggataatttactcatcagttcccctgataataagtattcagacaatcggcagcggaatgtctttaaacatggcttcgatgtcttcattattacgcagcgcaatcgctttatccaccacatcgcgcgtcagatgcggcgcgaaacgccacataaaatcatacatataggttctcaggaaactaccgcgccggaaaccgatttttgtggtgctgtagctgaatttatcccgcatatcgatactgacgaggtctttatctgtctccggatcgaccgccatactggcaataatcccgatcccgagcccgagacggacataggttttaatcacatccgcatctgttgcggtaaagacgactttcggtttcagcccctgtttttcaaaggtgctgtccagctcggaacggccggtgaaaccgtgggtataggtgacaatttcatactccgcgatatccgcgatagtcaggtcgcgccgctgcgccagcgggtgatcacggcggaccaccacggcccggttccactgatagcacggcagcataatcaaatcgttatacagatgcagggcttctgtcgcgatggcaaaatcgctgttgcctttgcagacatcctcggctatctgtgtcggtgtgccctggtgcatatgcagggaaacatgcggataacgctcaataaagcctttaatgaccggcggcagtgcataacgcgcctgagtatgggtcgtggcgatactcagggttccctgctccggatacgtgtgctcgctggcgacagccttgatggcatctattttcgccagcacttcacgggagatgcggataacagattccccggccggtgtcacgtgggtcagatgtttaccgctgcgggcaaaaatctgcattcccagctcatcttccagcatccggatctgcttactgataccgggttgtgatgtgtacagcccctcggcagtcgaggagacattcagattgtgattaaccacttccacaatatagcgcagctgctgtaatttcatccgcttattcctttccgtgcaggttcggcattgcttactcctttttcatctttattattccgaaaaagaataagtgagcaaattgttataacgttattctattcagtgacgatataacaaaaaatgcacgggcaccagccaaaaaataacagctcaatgccctgatactgcgcatttctcagcaaagcgcgggaaatcacggctattcctttcttaggctattttatttaatgcttataacaaaaagctattaatcactgtctgccgtacaatacaccgccagaacactgtttccggcataaaaaaaccggtcagggaaatcctgaccggtttttattattgtgacaacagaaccctataacgacagattatttggctttctcaacccatttgccgtcgatatagaatgcagaccagccggtggctttgccgtctttatcggatgccacatactgctgtttggttttgcggctccagcggacagtcgtcggattaccgtccggatccgccaccggcgcttccgccagataacgcattttctcagacagacgatctttaaagcgaaccagttctgctacctgcggtgcacgggtttcccgtgatttagggaaattgtgcgccgccaggaagataccggcagcaccatcacgcagtacaaagtacgcgtctgatttttcgcacggcagttccggtaacggaaccggatcttctttcggcggagcgacttcaccgttacgcagaattttacgggtgtttttacactcgtcgttggtacagcccatgtacttaccgaaacgccccattttcaggtgcatctcagagccgcatttctcacattcaacgaccgggccatcataccctttaatgcggaactcaccttcttcgacttcgtacccttcacattccgggttgttaccgcagacatgcagtttacggccggtgtcgatcaggtagctgtccatcgcagtgccgcatttcgggcagcggcggcgggcacgcagcgcattggtttccgcgtcatccccttcaaggatattgaggatttcgtgttccggaatcaggttgatggtctgcttgcagcgctctttcggcggcagagcataaccggaacagcccaggaataccccggtggatgcggtacggatccccatcgggcgggaacaggtcggacagatgatcgaggtaatgaccatcgggttcgttcgcataccgccttcttccggctctttgcccgcgttatccagctgcttgctgaaatcagcaaagaattcgtccagcaccgatttccacttcgcttcattgttggcgatatggtcgagctgattttccatccgtgcggtaaagtcgtagttcatcagttccgcaaaggtttcttcgagacgatcggtgacaatttcacccattttctcagcatagaaacggcggttttccactttcacataaccgcggtcctgaatggtggaaataattgacgcataggtggacggacgaccgataccgcgtttttccagctctttaaccagtgacgcctcactgaaacgcgcaggcggtttagtgaagtgctgtaccggatcaatcgcttcgcgcgtcatgaccgtgcccggcgcaatcgcaggcagcgtattatcttcatcattcttacgcagtgcaggcatcactttggtccagccgtcgaaacgcagtgtgcgccctttggctttcagtgtgaaatcacccgcttctgcggtcagtgtggtggaatcgtattttgccggtgtcatctgacacgcgacaaactgacgccagatcaactgatacaggcggcgcgcatccggctccatatccttgagcatctcttccgttacagcgatatcagacggacggatagcttcgtgcgcttcctgggaattctctttgttgctgtacagattcggcgaggcaggcagatacttatcaccgaaattctcagtgatatagtcacgcgccattgtaatggcatcctggctcaggttggtggaatcggtacgcatataggtgatgtgaccggcttcataaagacgctgtgccatcatcatggttttcttcacaccaaagctcaggcgcgtgctcgcggcctgctggagtgtggaggtaataaacggtgcacccggcttgctggaggtcggacggtcttcgcggtcagtaattttaaaggtggcagcctgtaacttgctgacagcagcatgtgcctgtttctcattgaccgctttaaaggttttgccgttttcctgcaccacttccatgcgcagctgatcttttttatcagacagcagtgcgtggatctgccagtactcttccggtacaaacgctttgatttcgcgctcgcgctcaacaatcagacgcaccgcgacagactgcacacgaccggcggataaaccacgggcaattttcttccacagtagcggagacaccatgtaacccaccacgcgatccataaagcggcgcgcctgctgggcattcacacggtcaatattcagttcgcccggctgttcaaacgcctgacttatcgcatttttggtgatttcattaaatacaacccggctgaagcggctgtcatcaccgccgatcacttcccgcaggtgccatgcaatggcttccccttcgcggtcaaggtccgttgcgagatagatgtgtgatgcatcggcggccaggtgctgtaattcagaaacaaccttttctttgcccggcagaatctgataatccgcttcccagccgtggtacgggtcaacacccatccggctgaccagcgctgtgcgttcgtcttttttaacttttttcgttttatcgcctgcagcagcgggtttacggctcgctgaaccactcgtcggcagatcccggatgtgaccgacgctggatttcaccacgtagtctttgccgagatacttgttaatcgttttggcttttgccggggactccacgatgacaagagctttacccataattatcattacctaaattttcggggcgattataaaaacgccaatttttgcgttaaatacactgccttttatattgaggcactttcgtaatagatcaactctttttatactaatgctttgtttcaactcaaaacatctgtcaggaaatgatgtatttttaatatcgccgtcaccggagtgtattacgcaaatagtcttcccgccacgttgcggggctcttgaaaagttcacactctacctgataaatagtgatgcgcaacaaattatttttcaaaggagttcacagaatgcaaaaagaaaccatcgccatcagcaaacaagagctgttagaaaaagccaataaaatcatacaggaacatgaagattttctggagggtatgcaggctgatgatgttgaacagaaatccggcgtattggtttttaaaggtgaatactttttagacgaccagggcctgccgacactcaaaagtgcggccgtctttaatatgtttaaacatctcgctcacgttctgtcagaacaatatcatctggcggattaacagacggataccagaatagtcaccggtcggataataataatccgcaaagaataacggcagcctgcgctgccgttatttatattgagacggttatttcccgaccgggccattcccgcgctgccaccagcggagaataaggcggtcagcactcatcatcacactctgggtgattttatcaataagacgcttacggcggaaataacgcacctgaatcacttcatggtcaggaattgccgcgacaattaaatcatcactcactgccagctcatcaaccagtcccagctcttttgcctgggtgccgtaccagtgttcaccggtcgccactttatcaatgtccagagacggacggttctgagaaacaaagcttttgaacagaacgtgcgtttcatccagctcctgctggaatttctcacggccttcatcggtattctgcccgatgaatgtcagcgtgcgtttatattgaccggcagtatgcatttccacatcaatatcatttttcttcagcagacgatggatgttaggcacctgtgccaccacgccaatcgaaccgacaatcgcaaacggcgcggccacaattttatccgccacacacgccatcatataaccaccactggccgcgactttatcaaccgcaatggtaatacggatatttttctcacgcagacgggtcagctgagcggctgccagaccataggcgtgaaccagtccgcccggactttccagacgcaccagcacttcatccagacccggctcggccacggacagaataatggtgatttcttcacgcagtgattccacctcgtgcgcatccaggctgcctttaaagtcaattacatagatacaggatttgcgcagacgggtctgaccgtttttggcgttgcttttgtcttttttatcttcgtttttttgttgttttttaaacgctttattccagactttctgttctgcttcgctcatgcgggcatgttgcatttcacgctgtctgtcgcggtagttttcacccagatccgtcagacgtaatttacccagagactgccctttacggatgctgagcatgacaaagaacacgacaatggcaatgattgccagaacaatagttacggtttcagcaagaaacaaaccgtattgtgagagaaactccaccggcacaccttaatactgttaaattgaatggcactattttaactaaaaaatctgataaatgctcaactagttttgtaacccttgatggcaatcacgccctgaggacggtatgataaaaacgggttcacaccctgtccgggatgtgatacccgtccatttgcttttccggagttatcaccatgcataataatgatgtatcccgcttttccccgtcctcccctgatgcactgaagaataaaatcatcctgataaccggtgccggtgacgggattggccgtgaagccgccctgacctatgcccgctacggtgcggaactgatcctgaccggccggacagaatccaaattacaggccgtccgtgatgaaatcacgcagcgttacgggtcagtgccgcgtatttatcatcaggacttactgacactgacagaagcgcaaagccgtcagttcgctgccgcgctggaacaggagattccgcggctggatggcgtactgcacaacgccggtattctgggcgtggtcgcgccgctcactgagcagccggtacagttatggcaggatgtaatgcaggtgaatgttaatggtacctttatactgacacaggcactgttaccgctcctgctgaaatccccgcagagttcgctggtattcacatcatcaagtgtcggccgcgaaggccgtgccgcatggggagcctatgccgtctcaaaatttgccactgaaggtatgatgcaggttctggctgaggaatataaaggcacagggctgcgcgtcagctgcattaatccgggcggtacccgcacggccatgcgcgccggcgcatttccggatgaggcatcagaaaaactgaaaaccccggcggatattatgccgacctatttatatgtgatgtgtgatgacagtgccggtaaaaacgggatcagctatgatgcgcagcccggacgcaaagccggaccggcggaataattaaaggcagtaacgtcagtgtgccgggggcgtttcatccgtttgcagcggtaaaaccccggcaccgaaaatttcaccggtttcctgcacaaactcactgaatctccggctctcttctttgtcagtcttattctctttatcgctttgcagcagtatctgacggtaacgattagccatccgcatcagtaccgtgtgataacggctgtatatttcatatttttttgtcacatcagtctgatgccggaactccgtcacaatatcagtgattttctctgcatcctcacgcaattccgcatcctgaaactgaatgtcatgcgggcggaaagtattaccggtatccgcatcctgttccggggtgagcaccgtattatccggtaataaactgacaccgcgcggattgtattccaggaaccggcggaattcattttcattcatacagattgtcatcattcctttttctccggcaataaatctgtccagcaccgcttttatatcaggtacatcggaagagaaccggcatttaaacaggttattatcgataacgtcggcattactggtccgcaacggtccctgataataatggccgtcaaatttaaatgtctttaccatggaattaaattgcggtgaatacagcgtatcgccgtcatgaatggtataggaataataacgggcacgggaaggattgaggattccgccgctgtttccgggataagccataaaggaaatctgttgtccctgcggggtttccagcttattcagaccggatggcagataaacaatgccctccgcgtcatgtgcaaggtgataactttttccgtttaccgtaaaaaacagatcatccccggtaatattactgtagtaataccggctcagttcaggtgtgccgggctgtgtttcgtcatcacatccggggagcagaaagatgagcgttaacagaccgcatctggttatcgcaataatcatctcctcgcagatatatctctgtttcccggtcattcaccggcgggaaatactgttttgattattttaacccacactgcgggtatttgcatgactcctgtacaaaaaaacgccccgtgcgatggcacaggacgtttataagaacaaatacaggctgaaataacagaaaataccggttttacgtaaccggattattatttaccggtacggcgtttctgtgtatttccggtaccctgacgggttgatgacggacgcccggaattacgttttgatgcggtggtgccgacttgtgagtgacgttttaccgcacggcggatctgattggctttgatccggcgtttatcactttccacagaaaccttggtggtggtttccgccggcagtcccaccagttcgcgcaggtagttggttttttccaggttcagttccacccatccgccacgcggcagcgctttcggcagatcgatgtcgccgtaacggacacggatcaggcggctgacctgcacaccgaccgcttcccacatccggcggacttcacggttacgaccttcggtcagggagacattaaaccactggttgataccttccccgcctttgaatttcagcgagcggaatgaagccggaccatcttccagctgaacacctttgagcagttgattgcgtttggcatcatccacttcaccgaagacacggaccgcatattcacgctccacttcacggctcgggtgcatcaggcggtttgccagttccccgtcggtggtgaacagcagtaatccgctggtattcacatccaggcgaccgacggcaatccagcgggctccctgaatacgcggcagacgatcaaagactgtcggacggccgtccgggtcgtggcgggtacataattccccttccggcttgtaatacgccagaacacgacacgggtttttctgtgcatctttgatgcctaaaatccggccgtcgaggcggattttagcattcgtattaacatcgatacggtcacccagtgtggcagttttgccgtcaatggagatacggcccgcttcgatgtaactttcaatttcgcggcgtgagccatgccctgcatgcgccaacaccttttgtaacttttctgttttctggctcattgagcaccctctgctgtcgccttcacaggcgtcataaaaatcaaccgcagcattatacacaggttaatgcacggcgctaacgcattttacacatgtgacgcacacggcggtcacaggaacggcgttacatctccggttccttcacgcaccacaaccggcacgtcgtcagtcaaatcgataaccgtggtcggttgctggccgatataaccgccgtggatcaccagatccacctgcttgcctagggtatcgttaatttcttccggatcagattccgcaaaatcattgcccggcaggatcagactggctgacatcagcggttcacccattgcagcaagtaaatccatggcaatcgggtttgccggaatacgcagaccaatcgttttacgtttttcactcatcagacggcgcggcacttctttggttgcccgcagaataaaggtgtaattacccggtgtattatttttgattaaacggaataccgtgttatccacatgtgcataggtggagatatccgataaatcgcggcacatcagggtaaagttatgattactgtctatctgacgcagacggcagatccgctgtaacgcatctttatcttccaggcggcagccgatggcatagccggaatcggtcgggtaaatcaccacgccgcctttgttaaaaatctccacgctctgattgatcaggcgtgcctgcgggttatccggatggatataaaacatctggcccatgttgtttcctctgttaatccttcagtgaccaatcctgccagattggtattacatcacccggtaaccacaatttacggcccagttctatccacgaacacggctgatgaaaatcggatccctgggaggcttttaatccgtatgttattgcgtattgcgccagagtccggcgctcatccggagcctgctgacactgcgccacttccatgccatccccgccggcctgtctaaagaaatcacacaggcgcttaagccacttggcggataagccatagcggccgggatgtgccagcacggcctgtccgccggcggcatgaatggcctgtaccgcgtcagggatatcacaccactgcggcggcacataaccggttttgttacgggcgagataacgtttgaacactttcggaatcgtcggttccacaccacgggcgatcaacacccgggcgaagtgtccgcgcgtgacttcaccgccctgcgccagctcattcgcctcatcccaggtgccttcaattccggcctttgccagccgttcactgataagcatcccgcgtgcccggcgccgttctgactgctgcgccagtaattctgtcattgccggatgggtaatatcaatattcagcccgacaatatgaatctcatgatgttcccaaagcgttgatatttcaacaccattaatcaccgtcagcggtaaattatttgcctgctgataatgatgtgccgccggaagtgcatccgtggtgtcgtgatcggtaattgccagcacggtcacctttatctcaacggctctgtccagtaactgctccggtgtcagcatgccgtctgacgcagtggtatggctgtgtaaatcatagcacgacaggtcaatacctgtattttccggctccatcgcgtctcccttctgttctgacaatgcattgccagaagtgacttcataaaatttcatccgcatttacgggacgcacagtattccacaaaaacccttgacacaccaaccacgatctagttaactagtacatagaacgagttatctgtaatcactgtttataccgaggacatcccatgaacatgcacaaactgaacaatcgttggtggcgcaatctttcccgtcgggcggaatggttgtgcgtgcatgtcagttaaccggctgtaccagagcacagtacccgcccccgtggcgggtttttttatggcaaaaaattcacatagcaaggtaattatcatggacagcacgattttcacacaacacatccggacagcttatccggcttatcagcccgacccggcggcggtattcaccgcgctttgcgcacagcgtcctgcaacgctgttattagaatccgccgaaatcgcgtccagagcaaatttaaaaagcatgctggtgctgcacagcgcactgcgtatccgctgcaccggacacaccgtcaccgcagaagcactgaccgccaacggcgctgcattgctgccggtattgcaggcaagtctgtccgccgggactatcagcggtaacacactgacactgcatttcactgcgccggccgcccatgcggatgaagatacccgcctgcgcgccgcctcggtctttgatgtgctccgcaccctgatgaacctgccgtcacaggcagatgaccgtcacgcgctgttctgcggcggactgttcagctacgacctggtcgcggcctttgaggcactgccgccggttgagcgcactaacagctgcccggattactgtttttatctggcggaaacactgctcaccatcgaccaccagcagcagaccagtgaactggttaccctgacatttacagcggatgccgcagaacaaacccgcctgacagcacagcatcagcaggtattaacgactctggcacagccggtaaccggttctgcgtctgtcacaccggtagacatcagcgtgacaacgtcacattcggatgctgatttctgcactatcgtgaatcagttaaaacaatccattgttcagggtgatatcttccaggtcgtgccgtcacgccgctttcagttaccgtgcccatccccgatggccgcttaccgcgaactgaaaacccgcaacccgagtccttacctgttctttatgcaggatgcggatttcactctgttcggcgcatcaccggaaagcgcactgaaatatgacccggcaacccgtcagattgaaatctacccgattgcgggcacccgtccgcgcggtctgtcagcagacggttcggtggatgcggataaagacagccgtctggagcttgatctgcgtacggatcagaaagagctggccgaacacttcatgctggtcgatcttgcccgtaatgacctcgcccgtatctgccgtcccggcagccgtagtgtggcggaactgaccaaagtggatcgttatgcgtttgtgatgcacctggtgtcccgcgtcaccggtgaattacgcgacgacctcgatattttccatgcttatcaggcgtgcatgaacatgggcaccctgaccggcgcaccgaaagtccgtgcaatggaactgattgcacaggccgagaaagtccgtcgcggcagctacggcggcgcggtcggctattttcgcggcgataccaccttcgatacctgcattgtgatccgctctgcctatgtcgaaaacggcattgccactgtgcaggccggcggcggtgtggtactggattccgacccgcaggcggaagctgacgaaaaccgcaacaaagcccgcgcggtgatccgcgccatcacccgcgcccatcatgcagaggagacattctgatggctgatattttactgctcgataatgtcgattcctttacctataacctggccgaccagttccgtgctcagggccatcaggtggtgatttaccgtaaccgggttccggcggaggtcattctgtccgcgctggaaaccatgaaaaacccggtactggtgctctctccgggaccgggaaaaccggcagatgccggatgccagccggaagtgctgagtcgtgtcagagggcgttacccggtgattggtatttgtctcggtcatcaggcgattattgaagcctacggcggcaaagtcagtcacgccggtgctgtgctccacggtaaagccagccagttgcaccacgatgagcaatctatgttttccggtctgccgaacccgatgaaagtggcacgctatcactcactggcagcggaaattatcccggaagccctgaccgtgtgtgccaccagcgacaacattgtgatggccgtccgccatgagcaggacaaagtctgcggcttacagtttcaccccgaatccgttctgacaccggacggtgcggccctgctggctaatacccttgcgtgggcacaggcataactcaacctgaataacagataaaaaaacagattaaggaacagagagatgcaaacattatttgaaaaactttaccggggtgaaacactgaccctggcggaaagccgggagttattttccgcgattatccggggagaactaagtgaaacccagctggcggcagcgctgatcagcatgaaaatgcgcggcgagcagccggatgaaattgccggtgccgcccaggcctgtctgaacaatgcccgcgccttcccgcgcccggactatcgtttcagtgatattgtcggcaccggcggcgatgcttccgacagtatcaatatctccacggccagcgcctttgtggctgcggcctgcgggataaaagtcgccaaacacggcagccgcagtgtttcgagcaaaaccggctcttctgatttactgaatgccttcgggatcgcgctggataccccggcggatgtgtcccgcagcgcactggatgatgtcggcgtctgctttctgtttgccccgcactatcacgacggcttccgttttgccgcgccggtgcgtcagcagctgaaaacccgtaccttatttaatatcctcgggccgctgatcaacccggcccgtccgccggtcgccctgatcggcgtatatagcccggcactgatccgccctgttgctgagacgctgaaagtcctcggctaccagcgtgccgccgtagtacacagcggcggaatggatgaggtttccctgcacgcaccgacacaggttgccgaattgcataacggggagatccgcgaataccgcctgaccacagacgatttcggcctgccgggttatgacatgcaggaattgcgcggcggtaccccggaagaaaaccgtcagttgctgacccggttattacagggagaaggcaccgcagcacaaagtcacgccgtggcagccaatgtcgccctgctgatgaaactcaatgataacgaagacttacaggataatgctcagcacgcgctggcaatgatccgcagtggtaacgcctttgagcgcgtcaccgccctggccgcgagaggataaaccatgaaaggcaccgtattagaacagattgtgaatgataaacgtatctccctggttgcgcggaagaaacaggagccgctgctgagttttgcggataatctgccgctgagtgaccgcgatttttatcaggctctgcgcagcgcggaaactgcgtttattctggagtgcaaaaaagcctctccgtcgaaagggcttatccgtcaggattttaatctcagtgaaatcgccgcagcctatgcgccgtatgccacagcagtctctgtactgaccgacgagaaatattttcagggacaacatgactatctgcggcaggtgcgcgcgctgatcactcagccggtgttgtgcaaagatttcattattgatgcttatcaggtgtatctcgcccgccactatggagcagacgcgattctgctgatgctctccgtcctgaatgatgcggattatcactcactggcgaccctggctcattccctcaatatgggtgtgctgacggaagtcagtacggaagaagaactgtatcgcgctattgcccttgatgcacaggttatcggtatcaataaccgcgatctgcgcgacctctccattgaccgccgccggacagcggattttgcaccgcatattccggctgaccgcattattatcagtgaatccggcattaccacccatcagcacatccgcgaattgcgtccccatgctgacggattcctgatcggcagtgccattatggcgcagcctgatctggacacagctatccgccgcctgatttacggcgaacacaaagtctgcggactgacccgtgcggacgatgcccgcgccgcttatgacgccggtgccaccttcggcggcctgatttttgtcagcaaatcgccgcgttatgtggatgaagtacaggcaacggaggtgatgtgtggtgcgccgctggcgtacgtcggcgtgttccgtaaccatgaccccgcagatatcgctgccattgcccgccgtctgaaactgcatgcggttcagttacacggtgatgaaaacgagcacgatatcgcgctgctgcgtctgcaccttccggcaaaatgtgagatctggaaagcactggatatgtcgcacggtgcggatatcaccgtgccggacggcgtggtgcggctggtgctggataacggcaaaggcggcaccgggcagactttcgactggcagactctgcccccttcactgccggtgccctttaccctcgcgggcgggctgaatgcggaaaactgtgtctccgccgccgcctccggtgctgccgggctggattttaactccggcgccgaatccgcccccggtattaaagatgcagaaaaacttcgtcagatatttaatcaattacatcagcaagttgcctgactacgactgaaaagaaaaaggatcagaaaacaatgagtaaattaaatccctattttggtgaattcggcgggcagtttgtgccgcagattttaatcccggcactcgaccagctcgaagatgcctttattgccgctcaggaagacccggaatttcagcgtgaatttaccgatctgctgcaaaactatgccggacgcccgacagccctgacactgtgcaaaaacctgactgcgggcagcaaaaccaaactgtatctgaaacgcgaagatttactgcacggcggtgcgcataaaaccaaccaggtgctcggccaggcactgctggcaaaacggatgggaaaaacggaaattattgccgaaaccggagccggtcagcacggcgtggcggcagcactggccagtgcgctgctcggcctgaaatgccgggtgtatatgggggcaaaagacgtggaacgtcagtctccgaatgtgttccgcatgcggttgatgggcgcggaagtcattccggtgcacagcggctccgccacgctgaaagatgcctgtaatgaggcgctgcgcgactggagcggcaattatgaccgcgcccactatttattaggcaccgcggcaggtccgcatccgtacccgaccattgtccgcgagttccagcgtatgatcggtgatgaggcccgcgcccagatcctcgcccgtgaaggtcgtcttccggatgcggtgatcgcctgtatcggcggcggttcaaacgctatcggcgcatttgccgggtttattcccgatgaatccgtcgccctgatcggcgtcgaaccggccggacacggtattgaaaccggtgaacacggtgcgccgctcaaacatggccgcatcggtatctatttcggcatgaaatcaccgatgatgcagacagaagacggccaaatcgaggaatcttactccatctccgccggtctggatttcccgtctgtcgggccgcagcacgcgtatctgaatgctatcggccgggcggattatgtttccgccaccgatgacgaggcacttgacgcctttaaaaccctgagccgtcaggaagggattatcccggcactggaatcctcccatgccctggcacacgcactgaaaatgatccgtgaaaatccggagaaagaacaaattattatcgtcaatatttccggtcgcggagacaaagatattttcactgtttatgacatttttaaagcaagaggtgatttctgatgagccggtatgaacaactttttcagcgtttgcagtcccgtaatcagggtgcgtttatcccgtttgtcactctgggtgatccgtccgctgaggtttccctgcaaattattgatgcactggtggacggtggtgccgacgccctggaaatcggtattccgttttctgacccgctggcagacggtccggtgattcaggatgccaaccttcgtgcctttgcggccggtatgaccccggcacgctgctttgagctgattgcacaaatccgtgcaaaatatccggaactgccggtgggattgctgatgtatgccaacctggttttccataacggtatcagtcagttttatgaaacagcggcaaaagccggggtggattcggtgctgatcgccgatgtgccgctgcatgagtctcagccgttccgggatgccgcgctggccaataatatcgcaccggtctttatctgcccgccggatgcggatgataaattactggaaacactggccgccgccggaaaaggctatacctatctgctctcccgcgccggggtgacaggaacagaaaagcgggctgaaaagtccctggctgatctgacggcaaaactgaccgcgctgaatgccgcaccgccggttcagggattcgggatttctgaaccggaacaggtacaggaatcactgcggaatggtgctgcaggggcgatttccggctctgctgtggtaaaaatcatcgccgcaaatctggataatataccggtgatgtgtcagaaactgcgggaatttacgcagaaaatgaaaaacgcaacgcaattataatttttcattccgcccgctgttaacagcgggttattttttgttgagaaacatccggttttcatcaatactgaaaaggtcaggcacacattattctgcgatccgtgccggtaataaggagaacataatgaagtatatgaaactggtcacctcattttttgttgtcatgtttatggctttcaccctgtccgcctgtgccccgactgccaccagtgaaggtaccggggggtattttgatgattccgtcattaccactaaagtgaaaacagcgttactgggtgagaaaggcattaaatccactcaaatcagcgtggaaacatttaaaggtaaagttcagctgagcggatttgtctcttcagaaaaagaagcgaacctggcggtaaataccgcgcgtaaagttccgggtgtgaaggttgttattaactcaatgaagttgcggtgactctgaatatcagattaccggataaaaaaacggcgcaataagaattgcgccgttttttatggtactgataacgaggattatcagaatttgtaaccgacaccaaacatgaatacccatggatccaggttagttttgtaagactggctggcaccaccggctttgaaatcaacatcagttttgatgttcatccaccagagggaggcgttcagcatccagttctggtctaattcataatccagacctgcctgtgctgccacaccccatgagctgctcatgctcagatcgcttaagcctgcgcctttaccggtatcgttaaatccttcatcaaagaagaaggtatagttaacacccacacctaaatacggacgcagtttatcttccggagtacggaaatagtactgtgccattaaggttggcggtaaatgtttggcagaggcaatttcacccgcagccggaacagagattttatgctcaaacggcgtcgctgccagtaattccacaccgatattatcggtgatcatataactgaaagttaaacctaactgagtattattgttcgcttcaaaagaaccgaaacccagaacattatcagagctgacgttcggacgtacagtcgcagtaccaccacgaacgataaaatcaccggcctggtgtgccattgaaactgacggtaaaacagttgccagtgctaaacacactgcagaaagctttttcattatctatcccatcctaaaaaaaagaaaaaaaacacaataagtacagtttgaaatatacaaccttaaatccaattatgatctaagacagatcacaacatttaaataaaaaacgcatttttcacaaagatctaaattattattccacggtagtattttcatttattgatttatatcaaaaacatccttcgctatttttagcgctatcattatttgtgtgctttatatcaatttgtaaaataagatgcttactattcagccgaatattttgttttattattgttaataatttgtatgcttttagttctctgtttccggatattccgtctgatcactgtatttctgccggatgaacaggttacaatccccgtcatactgttttacaattgcctcaacgtttttatttcatgccttacaggagttgttccatgtccatgccggtgccggttcttgcccgcgacagtcttaattttttccgtaatcagctgttgtctgtcctgatcatttcgctgctcaccgccgctgtgaccgtcgggctcaatgtgctcctgacttataactccaacgggctggcgcttatccgcgccctggaaaccacttacgccactgaaggctccggcggctttcagcgggcggtcgccgcactgacatccgatgaccagtggcaaatgctgaaaaccggcctcggaactatcttcagttccctgctgggcaatgccgtctttgtaacgtccatgattttcctgatcttcagtgcctcacagggacagccggtatccgcgttgcaggccatcaccggctctgcaggacgcattccacgcatgctggtgctgctgttaatctgctcgctggtgattgccctcgggcttgttgccatgtatctgccgggattaattctggctatgttactggcgctggcaccgatcattatgttcaccgaaaagaacagcgtatttaccgccattaaaatcagcggaaatattgccctgaaaaatatcagaacacttctgcctgctattttaatatggtttgccctgaaacaggcatccgtagtgtttcttagtaaacttccgatagaaaatgagcatattttgatgaccgttattctgtttattaataatgtcatcagcggactggtaattatttatctgttccggttctatcagttatttacacaatcgcaatctgccagcgactatcagtaaggcctgataatgcgcacagataatgatattgtcttttttgtgcgcaatatgatgtgcagactgttcaggaaataaaggaatacgattatgatcactctgcccgtcacgcttactgttcaggatctggctgactatcagacgttcagtttccggcatttttatcaggagccggtcgggtggagacgaattccttatattcttatctggctgatattatgcggaatgttattacttattttcagtacattttcgccgctgccgggcaaatttgatatttattctgttttttacgggctgagctgcgggtttttagcactactggtgtttatttacagccgttttgtcaaaagcagacgggttatgaagcagctttctgttcagtccggacattacctcctgcgccaggcaacgtttgaactgaataatgacgggataaaccaggtttctgccctttaccattctttttttgcctgggaatcggtcattgattatgccgaaagcgccaccgggttttatctttaccacggtaaatatgacggtattattattccgctgcgggatattcagtcagaggcacagaagaaagatattttgcacctgctgtcacagaaaataagaaatgtgcagataaaaaatcaggccaataagatggcctgattatccggtgtatctgcggtggtgattactgtactttgcgtaccgcttttacatccagttcggttttattccactctttgtcgatttccccttcgacctcaatttcatcctgcggcgtgactttcagtccgtcccagcgtttcggggaaatttcagcacggatagtcccggtgctgtctttaaattcataatgtttgttatccagctggcggacaatcgtaccgcgcagcacaaccggtgcatcatcagataatttcagtgcatccgcaacggtcattttacgggcatcagggccgctgaaaccgccgttttgtgccgctgtggtggttgtcacggctgttgcaccgggaccttcaaaaccgccgttggctgcaaaaacggaaccggctgatcctgccagtaaagtggcaagtaatgcgagtgcaggtaattttttcatcatttatctcctttatgaggaagcgtctttgcttcatggacactattaaaccattaagttcttaacaggatcttaaggggatatcatttttgattatatttttaatttcagaaaaaacaggtggttatcctgagatatctgagttaaaactagtatagcgctatttatacggataagaattatgcggatattattaattgaagatgaccggttgattggcgacgggctgaaaatcggcctaagcaggctcggctttacccctgactggtttaccgatgggcaaaccggccgggaggcgctctatgccgctccttatgatgccgtgatcctcgatctctccctgcccggcatggacggactggatatcctgaaacagtggcggtcagaggggcgcgacgaaccggtactgatcctgaccgcccgtgatgcccttgagcagcgcgtcagcggcttgcaacagggcgcagatgattatctgtgcaaaccgtttgccctggcagaagtcgcggcacggttacaggcactgatccgccgccgctacggtcagctctctgaaaaactggtgctcggcgacgtggagatggatccggtggcgatgaccgtcacccgcaacggcgtaccggtatcactgaaaggtaaagagctggcgctgctggcactgtttctgcgcaatccgcagaaagtgctgtcccgcgcgatgattgaagaaaaattgtataactgggatgaagatgtctccagtaatgccgttgaggtgcatattcaccatctgcgccgcaaactggggcgcggatttatcaaaactattcacggtgtcggttatgtcgcgggaaaaaatgatgaagacatatagtctgcgcctgcggctgggcggattattgctgctgctcaccctgctgacctggggtgtcgccagtgtgttcgcctggatgcagaccacaaaatccatcaatgaattattcgatacacaacaaatggcctttgccaaacgtctgtcagttttgccgtccgggctcgagttcccgccgtctgcgatacagaaaaccaaaaaaatgctctccgccaaccggggaaagcaggatgacgatgcattcgcttttgctattttcagtccgtcgggcgagcgggtgctggatgacggcgaaaacggccggaaaattccgttctcagacaagaaaaacgggttccgggacggctcgctgacggatgataacgaccgctggcgctttgtgcagctgccttccgccgatggccgctacatcatcgtggtcggccaggagtgggaataccgcgaggatatggggctgaccattatcaccgctcaggcgatcccgtggctggtggcactgccgctgatgctgcttctgttcctgtggctgctgacccgcgcactgactccgctgcgcctgctggcacggcagttacagcgccgtaacccggctgagctgacgccgctggccccgccggtgctgccgaaagaagtcagcccgatgctggacgccctgaacggattatttctgcgtatccgcgatctgcgcgagcgggaaagccgctttacctctgatgccgctcatgaactgcgcagcccgctggccgcactgaaagtacagactgaagtgatgcagattgccggggatgaccccgccacccgtgaacacgtgaccgcgaatctgatcaccgggattgaccgcgccacccgcctggtggatcagttactgaccctctcacggctggaatcacagtctcacccgcaggaatgtacagagctgcgctggtcaaccattattaatgatgccattgcacaaacagctccggatgcggctgcacatcaggtcagcgtgatatctgagctcgccgcgcctgaactgacgatccgcggcgaacagctgctgcttaccgtcatgctgcgcaatctgctgcataatgctatccgctacggaaaaaccggcggcaccgttcagctgacgctgacaccgcagcagttagtgattgaggatgatggtccgggcgtcagtgatgcgatactggcccggctgggagaacgtttttaccggccgccgggacaggaaaaaaccggcagcggtctgggattgtctatcgtgaaacgaattgcggaactgcatcatatgaccatacagttccgccgcagcccgcagggcgggtttatcgctgaaatcaggtggtgagcggtttttccgctccttctgccgcctgttccatcgcctcttctatcgctttgacacggctttgctgtttgctctgaatcagccggatagcgaaatagagatcaggcacaataatcaaatcatcatcattgcgtttgattttattttccgacacccagcgtgtcagttcggtgcgccgtcccgccaggatcagggtaacgcctttgattttcagctcagtcaccagctcattcagtgtgctgaacacactcatgtcattattgataaagctgacggtcgcatccaccgccacccatccgggacgtttcggtgcggtattcaccacctgtaacacccgctttttaaagtacgcaacgttgaaataggtcagcggcgagttaaaacggtacatcaataatccgtcaacctgactaatatccacgttactgttgttgatggaatggatcatcccctgctcatccacccccagtaactggtctgtcgggcggaaaaccgtgcgcaggaactgtaccagtcccagcagaaccgcaaacccgataccgttgatcagccccaccaccagcaccgccaccagagtaaacagcgccagcgtgaaagccgatttattccgtttacggaaagagaaaatctgacgaatgctgaacatcgaccaggaggagtaaatcagcaccaccccgagtgtcgccagcggaatgtgtccgaggaaaccggtcaggaaaaacagcaccagtgcgatcaatccggcggcgatcagcgataccatctgtgttttaccaccggtggcatcgttgacagctgtacggctggtcgcggcactgaccgcgaacccctgggataacccggaagcaatgttgatatacccctgtgcccgcagttcctgatccacatcgatggcatagccgtttttctcggcaaaactgcgcaccgtcatcataaagctgacaatgctgatcaccgcaaggttcagtgacgggatcaccagttcacgcagcagacccgggtcaaatgccggcattttgatatgcggcagcccgttaccgagattaccgaccacagcaatccccattgaggcaaaatccagctgcgcactgaccagtgtggcaatcgtcatcacaatcagcggccccggccagctgcggcggacagcccgtaataaaaacagcgccgccaggctggcagcggagaggatcagcgtcggcatatgcataagatgcagatgctccggcagcgccaccaggcactcaatcagctgggacggcagttcatccagcccgagcacattacctatctggccgacaataatcgtcaccgccacgccgttgagcagcccctgtaaaatcggctgtgataaaaaatctgcgaatgcggcgagtttgaaatgtccggcgatcagacaccagacacccgtcatcagcgtcatgataatcgccagctgccacagcgtatccgggtcacctttagccagcggaataatcgccgccgcaatcaccgcacaggttgccgcatccggcccgacaatcagctgacgggaggagccgaacagcgcataagtcaccatcggcaggatacaggcgtagagaccgacaatcgcattaatgcccatcagtcccgtgtaagcgatagccaccggcaatgccacggcagcaacagaaagccctgcgcggatatcaaagcgcaggtttttgcgttcatagtgcagaaaaacagaaagtcccggcatccagcgcaatagtcggttcgactgcattatcgccccttataaaaatatcgtattaagatgtacaatttaattttactgctaatagttaaactgatttataaccgaacgcggataaagaagatagtcagaccgcgtcttatggtaaaatattgcaaaatcaattgtaatatattttttttctttaaaaataagtgactggatgccacgtgcttaaaataaatttaaatttcggacagactcaattatgaagcaactactcgactttatccccctggttatcttttttgccatatataaaaccgtggatatctattacgcctccggtgccctgattgccgcctctgcgatggcgctggctgtccgctggttcatgtataaacatctggagaaatctgccgttatcacctttgtgattgtggccatcttcggcaccctgaccatcgttttccatgatccgcagtttatcaaatggaaagtgaccattatttatgcgctgtttgctctcgtgttactgggcggccagtttatcttcggtaagccgctgattcagaaaatgctgggcaaagaactgaccctgccgccacaggtctggcagcgtctgaatctcgcctgggctcttttctttatcgtctgcgcggccgtgaacgtgtatgtcgcgttctggttatccatggatacctggatgaacttcaaagtgtttggtctgaccgctgtaacactggtatttaccgttgccagtgtggtatatatttaccgtcatctgccacgggaagaagaaaaataataaaatcaaccggatatcggtttgtttccgccggtatcctttttcgttaaacggatgtaagtgtttctcatgactcaacaacaatgtttacctaacggggaactggtgctgcgcaccttaaccatgccgacagacaccaatgccaacggggatatcttcggcggctggctgatgtcgcaaatggatatcggcggcgctattctggcaaaggagattgcactcggccgcgtggtgaccgtccgcgtggacggcattacctttctgcgctctgtcgcggtcggtgatgtggtctgctgttatgcgcgctgcctgaaaaccgggaattcatccatgacagtcaaagttgaggtctgggtgaaaaaagtggctaccgatcctatcggtgaccgttaccgggcaacagaagctgtcttcagttatgttgcggtggatgcggataaccgtccccgcccgctgcccgacggaaaacgtcattttcagttagacagcagtaacagtgatttaaaataatgcgtttcataccggccactcttctgagtggccgttttgtctgccggaataaaccacaggttccccgcgacaccggcgtccggtaatagtatcattgccgcaaacctctctttttatttaatccggaattttcatcgtgacctcatttgctgaacttaatgcacttcccgcagaacaaattaccaacctgaatgaactgggttatctgaccatgaccccggttcaggccgccgcattaccggccattctcgcgggtaaagatgtccgtgcgcaggccaaaaccggcagcgggaaaaccgccgcattcggcctggggctgttacagcatatcgatgccggacactttatgacccaggcgcttgttctgtgcccgacccgcgaactggcggatcaggtcgccggtgaactgcgccgcctggcgcgttatctgccgaatatcaaaattctgaccttatgcggcggtgtgccgtttggtgcccagcgcgattcactgatccacccgccgcatattattgtggccaccccgggccgcctgattgaccatctgaacaaagacacgctgcaccttgatgctatccgcacactggtgctggatgaagctgaccgtatgctggatatgggctttgctgacgatattactgaaatcctctcccgtaccccggaagaacgtcagactctgctgttttccgccacctggccggatgagattgcagctgtcagccgccgttttcagcgcgatccgcaaaccatcgaaatcaacagcaccgacgaacttcctgcggttgagcagcagttttatgaagtttcacggcgtggcaaaactgaactgttacagaaattactgagccgcgaacaaccggcatcctgcgtggtattctgcaacaccaagaaagattgccaggatgtgtatgaagccctggaaggcagcggacagagtgttttagtgctgcacggtgatatggaacaacgcgagcgcgaccagaccctgatccgctttgccaacggcagcagccgtgtgctggttgccaccgatgtggcgtcacgcgggctcgatatcaaagcccttgagctggtgatcaactatgaactggcgtgggatccggaagtgcacgttcaccgcatcggccgtaccgcccgtgccggtgaaagcggactggcgatcagcctgtgtgcaccggaagaagcggtccgggcaaacgcactggaagagatgctgcatatgaaactgaactggcagccaatccctgccgggctgcgtatcaccccgctggatgcggcaatggcgacactgtgtattgacggcggcaaaaaagccaaaatccgtccgggggacattctcggcgccatgaccggtgatatggggctgaacggcgaagatatcggcaaaatcgtgatccacccgatgcatgcttatgtcgcggtgcgtcagggtatcgcgcagcaggcccgtaaactgcttcagcagggtaaaatcaaagggaaacctgtcagagtcagattgctgaaataattacaaaggacagcatttcccgtcagcggatgacatctctgttttatatccggccggccttttcaggccggctttattccacctgcatctcagtattctgctgaggcattttctgttaaagggtctttgtatggcagcgctgtttaatgctttagtctctgattcagttattttatttgtcgttatctttattttatctgtcggctcggcctatgccggaaaatacctgttcaaaaaacgtcatgggaaaaccgaattagcagatgatgaaaccaaaattgttctcggtgccgtattatccctgctcggcttattaatcggctttttactgacgatctctatcggcggctataataaccgcgaacagatggaagaaaacgaagctattgctatcggtaatgcattccagcgggcacaattactgtctccggaaaataacctgcgggcaaatactctgcttaacacgtatattgacgcacgtattgatttttttaacggcggctcacaggcaaaaaatgaaaaatggcgggatatctcccttgaggctcagtcctctctctggaagatcgctgcatctgaagcccgcacggccccgaatccggtgattgcctccgtactgaccgcattcagtgatctctatgtgtccgaagaaaaaaccatggccagctggcgctatcagatcccgggagccgcctgggtattactgattttatttgccgtcagtgccaatgtgctgatcgggtataatatccgcggactgcgcggcagcaatattatgattttaattctgccgctgctgacaaccatggctctgtttatgattgcggaaattgatattccgggtgaaggggttattcatgtagtaccggataatctggtgaatttacgcgctgatcttttcccagcaaaataagacagaaacaaaaaacccggcatttttatgtgccgggctttctttttttatcggatcactgaatagaggttttaccgtcgatccggaaaataatggtggtcgtcatgcctttcttcggctttttctcgtaacgccatttacgcattgcattacggacttcacgttcaaacatatttttcggtgatgcttcgataatatcgatattctgaatacggccatcggtatcgacatcaaatctgacccgcaccttcccttctttaccgaggctgcgtgcccgtgccggatagaccggatcagcacggttcagggctttcgggtcaccaccgccaacatcactttgtccggcagaagccacatttccgaccgggcctgcaggggctttctgcacattctgctgaccttccggcgtaccactgaacagcggtttatcggagaccggtgctttggtttcaaccggttttacggctggtttctcaacttttttctcttttttcggttttggttttggttttggttttttctcaaccggtttcttttccaccggtttttcaataaccggcttcacgaccggctcaggttcaggctcgggttccggctctgtttcgggttccggttcaggctgaggttcagccacagctgctgccggtgccggcgcaaacgctgccatctccaccatcagcactttaggttcgtcctcaacctccttattcatgttgtagtaaatcgctgcggccacagaggcatgcagacaaagagaaatgagaattggccagctgatccagcgaaaaataggcatagtcgatacaatcttataagcagctaataatgacaatggtcactagtgtaaatgcaaatagcaatcaatttcaatacgaaagacacaaccattgtcacttatcgtgctgatggtcacttcttagtggcttaattcagcctgagcaaacagcagcgaacggcgttgtctcgcgatatccagcttgcgcagagcaaaaatccggatgttccgccgggactgactttccagccagcgacgacgacgacgggttgcctgccgtaacatacgccaacgtgcaacttccggtctgctgtgtctcataactaaacccttttttagactgtgtgaaaaaataagctaataataagggcaattattataaactgcctgacacaataaccaaccgctttcccgcaatatctgcaaacaccggcagaaaaaagtggttaaactgacttaaatcacaaatacagcagcattacagaaagctttctgatacattttccggtggagtatcaatcagatcctgagcctgttttgtctgcaaaccttattcttagagaaagataatacctatgtcgacattttatacgctgttatattggctgagtattcttttctactggctgctggtcgccggtatctctgtccgcgtaatgtacaaacgccgcccggtaacatctaccatgacctggttactgatcatctatattctgccgtttatcggaattattgcgtatctcgccttcggtgaactccatctcggccgccgccgggttgagcaggcaaaaggaatgtggccgtctgtctccggctgggttgaaaatctgcgtcagtcaaaacacattttcgctacggaaaacagtacccaggctgctccgctgtttcagctgattgagcaccgccagggaattcccggggtaaaaggtaaccagattcagttgtttaccacctgcgaggactcattacgccagattgtcaaagatatcgataatgctaaacacagcattgatatggtgttttacatctggaaaccgggcggtgatgtggacaatgtcaccaatgccctgctcgccgccgccaagcggggcgtaaaatgccggattatggtggactccgccggcagctggcacttcttccgccatgattatccggagatgatgcgcaatgccgggatcgagtttgtcgaagctctgccggtaaacattctgcgcttcgccctgcgccggatggatttgcgtcagcaccggaaaatcgtcactatcgataactatatttcctacaccggcagtatgaatatggtggatccgcgctactttaaacaggacgccggtgtcggtgaatgggttgatatccttgttcgtatggaaggccctgtcaccaccctgttcggtattatctatgcactggactgggaaatggagcgcggagagcgcctgttaccgccgccgccggacgatattgaaatgccgtttgaaaaagacagcggtcataccgtcaatattgtggcttccggtccgggttaccctgaagagctgatccagcaatccctgatgacggctatttttgccgcacaggagcgtctgaccttcaccacgccgtattttgttccgagcgatgacctgatgcatgccatctgcaccgctgccatgcgtggcgtgcgtgttgcaattgtgatgccgcgcctcaatgactcattcctcgtccgctgggcaagccgcgcgttttatactgaactgctggaagccggtgtggaaatctatctgttcgaggatggtctgctgcacacgaaaagtgtcctcgtggatgaccagctcagtatggtcggttccgtaaacctggatatgcgcagcctgtggctcaactttgaaatcaccgccgttatcgatgatgaaagttttgccggtgacctgaatattgtccagaatgactatatttcacgcgcaacccgcctcgattacactgaatgggaaaaacgtccgctgaccaaccgtgttcttgagcggttatgttatttcttcagtcctctgctgtgataaactgactttctttattatccccgccggtataaaacggcgggggatcaccggaatgtaacctgacctatgagtacctctcttccccgtcgcctcagcgagcaggaaacgattgaaatggcctatgacctgtttctggaacaggcaatggataaccttgacccggcagacgtcctgctgtttaaccttcagtttgaagagatcggcggtgctgaaattgtaccaaccggcagtgactggtcagagtttgcaccttttctggcacaaaacccggaatgtgccgaagtggttatcggcctggctccggatgaaaatgcagatatcgatcagatttttgcccgtgtgctgatttcccggcattttaccggctcaccggaatacgctgtccgctggcgggaataatctccccgccggtcacgcggtcagcagcggcatttttcacgccgggcgattaatgaccttgtgataatgtcaatttcagcggaatcctctgcagcccctgcacgtaatgcaagattccatttgctgataatttttgcattttctgccatctcagaatgtgcagccaaccgcccttgtgccatcagccaggacgcgaccgcagcccagtcccataacggggattgcccgcgcagccgctgcaccggccccggaaaggtgcccgggccgcgcgcaccatctttgagcaacgcgattgcctgacgtgacataccagtcagttccgcaatatcactcaggccgacaagagcagaatccaccgattccacccgtgcattcacaccggctgactccgcatcttccaccgccgtacggattgcacaatccagagacggtgcttcccggtcaaattccagatagactgatttaccgtaaaaacagagtaatgcatcatcacaaccgcctgcaaataaggcatcctccaggttctctgtatctgctgtcacaccggacagcgtcagcgtaaaattatacagtgccatcgtttccccctttcctgctgcccgttttcactgacaggcatccacttttcgtctgatctgctttgcatggttttccggattccgtggtgttgaccagacgctcatctgatgctgccggtgctcatcattcggtgacccgcaccgtaaccggcagaatgcatgcgaggaattccccggcgcaatccatacccatccctgtaacagtgcatattcaatcgcggactgaatatgtttatccggatgtttcttcatttcctgtacctactgtagtttatatgttgacgttcgtcaacactccgatattaacacacctgaaaaaccggctgtgctttttaataacggaatcagtaagctgcctgcaaggccgcgaagtacgctctgtcagattttgcggctggtgcggaaaagcaggatgcggagatgaaaaaaaagcgcccgtaccgggcgctctgtcgcaaaaataagattaacggctttaccgtatttacagcggatcaaccttcaggcaggaaactgcatggcggaaactgccttccagcagcggccgggttcttgcgcattcactgtccgccagcgggcagcgggtgcggaagacacaaccggacggcggattaatcggtgacggcagttccccttccagcagctgaattgttttattctgctctttgtccggatccggcaccggcaccgcagacatcagcgctttggtgtacggatgcagcgggttatgatacacctcgtcatacgtaccgagttccactgcgtggccgagatacatcaccagcacacggtcagaaatgtgtttcaccaccgccaggtcatgagcgataaaaataagggacaatcccatctcccgctgtaattccttcagcaggttcaccacctgagcctgaatagacacatccagcgctgaaaccggctcatcacagataaccagtttcggctcgaggataagcgcgcgggcgataccgatacgctgacactgtccgccggaaaactcatgcggatagcggttcaccaggtttggcagcagcccgactttcatcatcatggctttgactttgtctgtcacttccgtcttactcattgacggataataggtgcgcagcggctccgcaataatatcgccgatagtcatacgcgggttaagtgatgccagcggatcctggaaaatcatctggatgtcattgcggacattgtgccagtctttttcactcataccgcacaggtctttgcccagccaggttacccggccggccgtggatttcaccaggccgataatcgcgcgggcaaacgtggatttcccgcagccggactccccgaccacaccgagtgtttccccttcatacagacggacagtcacaccatccaccgctttcaggctttttgccggctgccagaaccattgtttgttatctctgatggaaaaatggacttttaaatcttcaatttccagcagaaccggacgttctgaatgtgtcattatgccaactcctctgcagttctgaagcaggcacgcaaacggccctgagaaaatgcctgtaacggcggctcatgccgcgcacactcgtctgtcgcatactggcagcgcgggcggaacggacagcctgccgggagacgcaggaggttcggcgggttgccgggtatcgtggcgagctcactgtcttcctgcccgtcaaggcgcggaaccgctttaagcagcccgatagagtacggatgcgacggatggtagaacacatcacgggccgtgccgtattccatggtacgtccggcatacatcaccaacaccttatcgcagataccggcgactacacccaggtcatgggtgatcataataatcgccgtattgaactcattcttcagctcattgagcagcgtcatgatttgcgcctgcaccgtcacatccagtgccgtggtcggttcatccgcaatcagcagcttcggcttgcacagcagcgccatcgcaatcataacgcgctggcgcatcccgccggagaactcatgaggatacatattcatccgtttgcgggcttccggcattttcaccgcgtccagcatccggatagattcctcaaaagcatcgtgagaactcagacctttatgcagcatcagcacttccgtcagctgtttgctgactttcatgtacggattgagcgaggtcatcggatcctggaagatcatcgaaatctcttccgcccgcattttgttcagcgctttctctttcagattaagaatttcacgcccgttgaacaccgcagagccgctgaccacaccattgcgggccagcagtcccatcagcgcaaacgccgtctgtgatttcccggagccggattcaccgacaatcccgagtgtctcacccgccgccagcgaaaaattaagtttgtttacggcggtgacatcgccgtccggcgttttgaatgtcacgttcaggtcgttaacctgtaataactgagtcattggcggcctcctcagcgatctttcgggtcaagggcatcacgcagcccgtcaccgataaagttgaaacaaaacagagtcaccaccaggaatgctgccgggaacatcagtaaccagggcgaaacttccattgagttagcaccgtcattgagcagcgcgccccagctgcttaacggctcctgtgtacccagcccgaggaagctgaggaaggattcaaacaggatcatactcggcaccagcagtgaggcgtaaaccaccaccacacccagcacgttcgggacaatatgacgcagaatgatattgcgggtcggcacaccacagaccttcgccgcctcaataaattctttgctcttcaggctcagtgtctggccgcgcacgatacgcgccatatccagccaggaaaccatgccgatagccacgaaaatcagaaaaatattctgaccaaagaaggtcaccagcaggataacaaagaacataaacgggaaggagttgaggatttccagcacgcgcatcatgaccgagtcagttttgccgccgacatagccggacatcgcgccgtacagtgttcccaccagcacagcgaccagcgctgccgccagtcccaccatcagcgagatacgcccgccgatagccacacgcaccagcagatcacggccggaggagtcggtaccaaaatagtggccgctctccgtatccggtgctgcggacatcatgccccagtcggtatcgtcataggcgaactccgacagcatcggcataaaaatcacaaacagggtaattaaaaacaacagacacagactggtgatcgcggctttgttatgcataaagcggcggcgggcatccgcccacaggctgcgtccttcgacatcaagctgctccgtgaaattttccagagcttcgcggtttttttcattcggtaacatagcgtgctccgggactaataacggattttcggatcgataacggcatacagcacgtcaacgatacagttaaaggcgatggtcagtgtgccgaccaggatggtcagactcagcaccagagagtaatcgcggttcagcgcgccgttgacaaataactgccccacgcccggtaaaccgaaaatcgtctcaatcaccattgaacccgtgataatccccacaaatgccggtcccatataagagaccaccggtaacagtgccgggcgcagtgcatgccgccagacaatcttacgcatcggcagacctttcgcccgtgcggtacggataaagttggagtgcatcacctcaatcatggaactgcgcataatacgggagatactggcgatataggccagtgacagcgcgatcatcggcagaatgatattgctgagctgcccgccgttccagccgccgcccggcagccagtgcagatggatggcaaagataagaaccagcagcggcgccaccacaaagctgggaataaccaccccggtcatggcaaagcccatgacggtatagtcccatttggtgttctggttcagtgccgctatcacaccggcactcaccccgacaatcagcgccagcacaaacgccgccagcccgagttttgcggagaccggaaacgcggaggcgaccaggtcattcaccgagtaatctttatatttaaaggaaggcccgaagtccccctttgataactgaactaaataatcaaaatactgaacgtgaatcggatcattaagatggtacttggcttcaatattcgccatcacttccggcggcaatttacgctcaccggtaaatggactgcccggagccagacgcatcataaagaaagagatagtaattaacacaaaaagcgtcgggatcgcctcgagtatacggcgaagaataaacttaaacattgcccgttcctatacagtacccgcttccgggggtacacactacacaggccgcccttcgcagggcggccaaccgtcggtattattttttaatcatatataagtttttggtgtggaagtgatccagcggatcttttccggtatagccacctacatacggtttcactaaacgggtactgacatagtaatagaccggcacgatggcagagtctttatccagccgggcttccgcctgctgatagatctgcgcacgttccgcatcggttttcacctgaagggattgtttcatcagcttatcaaactccgcactcttataatgcggggtgttggtgctgctgtaagaaagaaccatattcaggaatgaagacggttcgttataatccgcacaccatgcggcacgggcaacatcataagtcccctgatggcgggtatcgaggaaggttttccattcctggttaaccagctgaacttctgcaccgaggtttttcttccagatagacgatgcggcgatcgccattttcttgtgcagatcagatgtgttatacagcaggttaaatttcagtggtttatctttggtaaacccggcttcttccagcagtttgcgcgctttttcgttacgctgctcctgcgtcatattcgcgaaccactcaggctctttggctgacataccatccgcaaacggtggtgtgaaaccaaatgccggggtatcaccctgtgctttgactttgttgaccataatgtcgcggtcaaggctcagtttcagggcttcacggactttcgggttatcaaacggcgctttttcgttattgatttcgtagtaataggtacacatatacggcgaaatgcgcagttcgtcaggaatttcttttttcagtttctggaacagttcaatcggcaggttgttataggtcatgtcgatttcaccgctgcggtagcggttaacatcagtaacttcagaggaaatcggcaggaaacggacattattaataacggttttttcgttatcccagtatttcgggttgcgggtcagttcgattttttcgttaaccacccagtctttcagggtgtatgcgccgttgctgacataattgcccggctgagtccacttatcaccgaatttctcgacagtggccggatgcaccggagacatggagttatgcgccagcagtttcggaatatacggcacttcttcagagagggtcagttcaagggttttatcatccagcgctttgatgcccagctcttccggctttttcttcccggcgataacatcatcaatattcaccacgtgagcatactggagataactggcatacggtgatgcggtattcggatcagccagacggcgccagctgtaaacgaagtcctgtgcggtgaccgggtcgccgttggaccattttgcatcttcgcggattttaaacgtccagactttaaaatctttattttcccaggagattgccgagcccggcagaatttcaccacttggtccttccagggtaataccttccatcaggtcacggataatattcgcttccggtaccccttccactttatgcggatccagtgactgcggctcagagccgttattgcggattaaatcctgtttatctgccagctgaacaccggccggtacatccgcagcaaacgcctgtgtaccaatacccatccccattgctgctaccacactgagtgccagcagtgtttttttcgttgaattaaccatcttacataaactccccattgacgaatgtgttttgcgtttgttgcgtttttatcaggtgcttttcgttttaacttccgcaccttcatttttttcgcactctgtgagtgcaaattttttattattaatgtgtttctaccatatataagcgcttaatatccatataatcaagcgggtcattgccggtaattccgccgactgatggttttatcagccggacactcacgcgataataaacaggaattaatgcagagtcctgatctaactgagtttctgcctcctggtaagcggattgacgtgttttttcatccgttgccagcaaagcacgctgcattgcactgtcaaatgcaatattccggtagaaactggtgttattactgctgtctgacagaaaaatgttcagaaacgaggatggctcattgtaatccgcgcaccaggtcgcccgggctacctgataatttccttcatggcgattctgattggaggttttccattcctggtttttcagcaccactttcgcgccgatatttttctgccacatggaggcggcggcaattgcctgctgtttattctgatcggacgtgttatagagcaattcaaaggtcagcggatttttttcgctgtaaccggcttcttccagcagtttgcgccctttttcattgcgctgttcctgagtcagggatgcccattccggtgtggtgaaatgcccgccgttaatataatgcggggtaaaaccgtaagcgggaatttgtccctgtcccatgattttatgagtgataatgtcgcgatccagccccagtttaacggcttcgcgtactttcgggtcggtaaacggtgccgcggtattatttatttcataatagaatgtgcataaatacggggaaatctgaacctgcgccggaatatcttttttcattttggcgaacagaaccggcggcaccgaactgttggtgacatctatttcaccggcgcgatagcggttaatatcactggtttctgactggagcggcaggaatgtcgcctgttcaatcacggtatctttatcattccagtatttcgggttgcgtttaagcaccagccgttcattcacattccaggcagacagggtatatgcgccgttaccggtaaattttccggcggatgtccatttatcaccaaattgttcaatcgcccctttcggtaccggcttcagtgcggtatggctcagcatatccgggaaatacggcaccggctgagtcagctgaacctgaaaggttctgtcatcaaccgctttgacgccgagactttccggcggttttttaccgctgataatgtcatccacattttcgacataggcataatgcagatagctgccgtaaggtgatgcggttttcgggtcagtcagccgccgccagctgtagacaaaatcctgtgcggtcaccggcgagccgtcactccacttagcatccggccgcagcgtgaatgtccagatgcggttatccggggacgaccagctctctgccaccccgggcacgatatgaccatcaccgtcagtggaaaccagcccttccagcagattaagaataatgttggattccggcacgccttccactttatgcggatcaagtgataccggttcagtaccgttattgataacaataacctgtttttccgccagctttgttcccggcggaacctgtgccgcccatgcggaataagagagtgcactcagcagcagcgcctgcgtgagggaaacagcaatagtgtgttttttcatcttccgtcccttctgaataacacctgttaaatgaacaacgtgattaaaaaatcgcaaatgctttatttataagtgccgtcagcgacgggatcagcctgtttttcggtgctgttttccggcctgatgtgcattttccggggcagtgattgtttttatctgcaaacagtgccgttctgccgctgaaataaaacattaacccaagactgcttatgatccggctgttttgctcagcccggataaaaaagtaaacatttaattaacaaaaagcaatttttccagataaaaaccctgcctctatcacagttttaactgattaaatattaacaaccacttaaaaaacaactgtaaataaaaagagtaaagtgaaaaatttcactgaaatatcaatctggtgagcaccggaaataatggattgacagcaaatatagtttctgttgtttatttaaccacctttatctgttatacccgtttattactgaacggtacgggttacggtatccgcccatacagcgccatttttagtgttattttttatgggctgataacccgttgttatattacagctgtttttccgctttttttgccggtgaaatctcccggtcagcaatttcagactatgattaattttggctataacgaaaagttataaacaagcacgtaacagactttgcaaaacagcgccgttttttttaacgtgtcagtattacaaaaaatcaataacaccgcgtttcaggggaaatatatgaaaaaaacatatccggcagcgtcactggctctgctcttttccgtctccgcatttgccgccacaccaccgaataccttaattgttgtccagagcctggatgatattgtcagtctggatccggcagaaagtaatgaactgtccagtatccagaccgttcccagcttatatcagcgcctggtacagccgaaccgtgataatccggagcagcttgacgctatcctgctggaagactggcaggccgatgccaccaataaaaccctgaccgtccggattaaagagaatgcaaaatttgcctccggcaacccggtacgcccggaagatattatcttctcttaccagcgcgctgtggtcatgaataaatcgcctgcgtttattctcaatattcttggctggaataaagagaatatcgcgcagcagtttgaaaaaaccggcgaccgcaccctgaaaataaaatggagtgcggatatcagcccggatgtggcactgaatctgttgtccaccccgatagcctcagtggtggacgaaaaactggtgacaccgaatattaaaaataatgacttcggtaatgcctggctgaaaatgcattctgccggcagcggtgcttattccctgaaggtctatcagccaaaccaggcgattgtgatggccgctaacccgcatgtctccaccggcgaggcgaaaatcccgtccattattattaaaaacgtgccggatccggcttcccgccgtctgctgattcagcagggtgatgcggatattgcccgtgaactgggtgctgaccagactgcggcactgaaaaacagcgccggggtacgggtggaaaatattccgtccgccgagcaggattatatggcgttcaacaccggcaacagcgccaatccgctgctgaaaaacccggcattgtgggaagcggcccgttatctggtggattatgaaggcattacccgcgatctactgaaaggccagtattttattcatcagagcttcctgccggtcggtttaccgggcgcgctggaaaataacccgtataaatttgatccggccaaagccaaagagattctggcaaacgccgggattaaagatgcccatttcaccctcgatgtggaaaacaagccaccgtatatcactatcgctcagtcacttcaggccagttttgctcagggcggtatcaaagtggaattattaccggcggcgggcagccaggtctattcccgtgtacgggcacgccagcatcaggcggccattcgtttctggatcccggactattttgatgcccattccaatgccagcgccttcgcctttaatgacggcaagagcagcactgttgcgtggctgaacggctgggatattcctcagttatcacaaaccacgctgaaagcggtcgctgagccggataaagccaaacgtgcgcaaatgtataccgccatgcaggaagaattacagcgcagttctccgtatgtctttatggcacagggacaaaaccaggtggtactgcgtgacaatgtgaaaggctatcagcagggactgaacgctgacatggtgtattacgacagagtcaccaaataatctgctgattttccggttatcaccccgtcagtatcgctgacggggtttgtgtgttttgtttttattcaggaactgctgtatgtccgatatttcccctgccggaacactgtttcgccatacgctgcgtgtgacgcttcagggtatttttacccttgcgctgacactgctcggattactggtgatcacctttgcattgtcggcactctcaccggttgaccgggtattacagattgtcggcgatcacgccagccatgagacctatgagcaggtacggctggagctggggctcgatcaacccgtctatattcagttctggcattatgcagagcgtctgctgcacggcgatctcggcatggcttcctctatgggacagccggtgctcgacggcgtgctgaccaccctgcccgcgaccattgaactggcgacgctctcactgttgatcggcgcttcgctcggcattctctgcggcgtgttatgcgcccgttatgccggaacaccatttgattttatcatccgcaccctgacactcctcggcaactcagtaccggttttctggctgggactgctgatgctgctgctgttctacgccacgctgcaatggagccccggcccggggcggctggatgatatctaccagtataccgtcgaggcgaaaaccggttttgtgctgatcgacacctggttgtccgatgaccccggcgcatttaccaatgcggtggcacacctgatcctgccggtgtcgttactggcctatttttgcctggcggggatcacccggctgacgcgcgccgcctgtctgagtgaaatgaataaagagtatgtcacgctggcccgcgccaaaggcaataccgacatgcaggtactgttccgtcatgtgctgccgaatatccgggggacgctgatcacagtgattgcccttgcctatacagggatgctggagggcgcggtactgaccgaaacggtcttttcctggcccggcatcggccgttacctgaccgccgccttatttgccggggataccaccgccgtaatgggcgggaccctggtgatcggtatctgctttatctttattaataacgtgacagatatgattgtgcgtttaacggatccgcgggtgaaatcatgacattactgccgaaaatccgccgttccccgtccgcgctgacgggcaccctgattattctgtttctgctgctggtggcgttgtttgcgccgtggctcgccccttatgacccggtactgcaaaacccggcacaacgcctgctggcaccggatgctcaacactggctcggaacggacagctacggacgtgatgtgctctcccgcctgatctacggcacccgcccgatgtttggtctggttgcactggtcgcagcaatcaccctgcccgccgggttattgatcggcattctggccggattttacggccgctgggtggaaacgattctgatgcgctttaccgatattgtcatgtcgatgccgcgcctgatcctcgcgtttgcctttgttgctattctcggcccggggctgattaacggcgcactggctctcgccctgacctcgtggcccgcctatgcccgccaggcacgcagtgaaatccgccatctgcgcaacagtgattatctggccagtgcggaaatgctggggatccgtggtctgcgtctgctgtggggacacattctgccgctctgtctgccgtcagctattgtccggttggcactggatctcgccaccattatcctggcggccgccggtctgggtttcctcgggctgggcgcacaaccgccgatggcggaatggggagccatgattgctgatggtatgcaggttatttttgaccagtggtggatagccgccgttcccggcgcggccattctgattgccggtatggcattcaatcttctgggtgatggtttacgggatattatggagccgcaacatgactgagccgcttatttgtgtccgtaatttgtgtgtggattacccccgcgcacaagtggtgaaaaatatctcctttaccctggggcaggagcggctggcgctggtcggggaatccggttccggcaaatccatgaccgccagagcgttgatgggcctggtgcgcaaaccggggattgtcagtgcggatacactgacattcggtcagacctccctgctgtctctgcgggaaaaacagtgggcggcactgcgcggcaatgacattgccatgatcatgcaggatccgcgctatgcgctgaatccggtcagaaatctgtatcagcagattgaagaatccctgctgcgtcatcagacactgaacaaatctgatcgccgcgaccgtgtttttgaaatggcccgtgccgccgggttatcagaacaggcgctctcccgctatccgggacaactttccggtggtatgggacagcgtgccatgattgcgattggcctgatcaacaacccttcggtcttaattgccgacgagccgacctccgccctggatgcccggctgcgccaccagattctggagctgattgtcagccagtgtgaggagcgccggatggggcttctgctgataagccacgatttgccgctggtagcggcccattgtcagcgcgtgatggtgatgtatcagggtcagcaggtggatgaactgcccgccgcacaactgccgcaggcaacacatccttacacccgcacattatggacctgccgcccggatgcacagacttacggcaccgatttgccggtattggatcgcaccgccctgcaggcgttactgactcaggagacacatcatgccggaaaataattcagcgccgattattgaagttaataatctttccgtcagcttcggacagcggcaggtggtttgtcaggccggttttcatctcaatgccggagagacgttcagtcttatcggtgagtccggctgtggaaaatccaccattttgcgggtgatcgccggattacagcgggaatggctgggcggcgtgcaactgctgtcacagcatatccaccccggccagcgttatcagggggctttgcgccgcaatgtgcagatggtctttcaggatccttatgcgtctctgcatccgttccatactattcaccgggcgctttccgaaccattacgcattcaccgcgaaaatgacatcggcaaccgggtggcagaggccattgtatctgtcgggctgccgccggatgtggcacagcgttatccgcatcagctctccggcggacagcgccagcgcattgctattgcccgtgccctgatgctgcgcccacaaatcctgttactcgatgaaccaacatccgcacttgatatgtctgtgcaggcggaaattctcaatctgcttaatcatctgaaaaccgcccacggcatgacctatctgctggtcagtcacgatgcggatgtggtggcgcatatgtcagaccgggcggcatttatggcgaacgggaaaattgaacgggaatttgatcgcgccgccctgctgcgcggcgaccaccggatggagaactaagagatataaaaacggggccgatggccccgttctgataataatgaactacgtgattatgacaataatcccgggaaactcattttcatgccggtaatgatcagctcaatacctaatgacatcagcatcagacccataatacgggtcactacgttgatgccggtttgtccgaggtattttacccacagtcccgcggagcggaacaacagccagcagcagaacgcgaatacgatgctggtcagcgccagtccgaaaaagttctgccagccctgccagcgggcactccagaccacacaggaactgatagcccccggccccgccatcagcggcagcgccagcggcaccacaccgatattgtcgcggatagccgtttccgactgctcctgtttgttctgcttatcttcccccagcttaccgctgatcatggacatggcgatgaggacaatcagtgtcccccccgctatccggaaagattcgatggaaataccgaacataatgaggatcttatcgccgaccagaagtgatgtgcacaaaatcacggccaccgaaaagttcgcaatcatgttggtcttattgcgcactgcggcagtctgataatttgtcatgctcataaagaccggcaaaataccgaccgggttgactaaggcaaataagccgacaaaaaattttaaataaccggaaaaatccagcaaagtgttgcccacaaaggatcctcaacctgatgataatacagtgatagcctgctgataataacagcaggctatcgcctgggggttgtaataattataaatgtgattattaacacagacatcataccgttgaatgtgcaggaaaaggaattgctttacgcagaatattttctgcttccggctgattcgatacagttatatcgccttacttctgcctgaatttcagacaatcatcagttcttctgtgaaattgaaacccgataccattcccgtcactccgtattgttcccgttttgactcatgctgaatggtgtcagcttgatacatttgtgatttagatcactttaatatttcccctgaatgttaagctgctttcattatagttgaatcgattcaactataatgtgaacagaaagacctgacgggctttttaagcaaatcagcgggcatatctgcattatgttaccggcaaaatcgatttagttaccggaagatatcaccgctataatcaaattgtatcaatccgctgatttgcttaaaaagtttaacaatttatcaggagtgatctgtatggccgtaacgaacgttaccgaactcaatgaattagttgtccgcgtgaagaaagctcagcgcgagtttgccggtttctcccaggaacaggtggatgctatcttccgggccgcggcactcgccgcagcagatgcccgtatcccgctggcaaaactggcggttgaagagtccggcatgggtattattgaagataaagtgatcaaaaaccattttgcttctgaatatatctataacgcctaccgcgatgagaaaacctgcggcatcttatcggaagacccgaccttcggcaccatcaccatcgcagaacctatcggtattatctgcggtatcgtcccgaccactaacccgacctccaccgcaatttttaaagcgctgatcagcctgaaaacccgtaacgggatcattttctccccgcatccgcgtgcgaaaaaagccaccaacagagcagcagagattgtcctcaacgcggctgttgccgccggtgccccgaaagatattatcggctggatcgacgagccgtcagtggaattgtccaatgccctgatgcatcacgctgataccaacctgatcctcgccaccggcgggccgggcatggtgaaagccgcctacagttccggtaaaccggccattggtgtgggcgcgggtaacacccctgtcgtaattgatgaaaccgctgatatcaaacgcgcggtggcctctattctgatgtcaaaaaccttcgataacggcgtgatttgtgcctctgagcaatcggttatcgtagtggatgatgtgtatgagcaggtcaaagaacgttttgaaacccacggcggttatattctgaaaggcaaagagctgaaagccgttcaggacatcattctgctcaacggcggactgaatgcgaaaattgtcggtcagtctgcggtgaaaattgctgaaatggccggtatcgaagtacctgcctggaccaaaattcttatcggtgcggtctccgtagtggatgaatccgagccgtttgcacacgaaaaactctccccgctgttagccatgtaccgcggcaaagattttgaagacgcggtgatcaaagcggaaaaactggtggaaatgggcgggatcggccacacctcctgcttatataccgatcaggacaaccagccggagcgcgtgaaattcttcggtgagaagatgaaaaccgcacgtatcctgattaacaccccggcatcacagggtgggatcggcgacctgtataacttcaaactgtctccgtcactgacactgggttgcggctcctggggtggtaactccatttccgaaaacgtcggaccgaaacatctgatcaacaccaaaaccgtggcaaaacgagctgaaaatatgttgtggcataaacttccgaaatctatctatttccgccgtggttctctgccggttgccctggaagagatcgccggtgacggtgcaaaacgcgcctttatcgtgactgacggctatctgttcaataacggctatgtggatgaagtcacccgtgtgctgaaatcctacggtatggaagtggaaattttctttgaagtggaagctgacccgacactttctgtggtccgcaaaggcgcagagcaaatgaacagcttcaaaccggacgtgattattgccctcggcggcggctccccgatggatgcagccaaaattatgtgggtgatgtatgagcatccggaaacccattttgaggaactggcactgcgctttatggatatccgtaaacgtatctataagttcccgaaaatgggcgtgaaagcaaaaatggttgctatcaccaccacatccggtaccggttctgaagtgactccgtttgcagttgtgacagatgataccaccggccagaaatacccgctggcggactatgcgctgaccccggatatggcgattgttgatgccaacctggtgatgaacatgccgaaatccctcaccgcgttcggcgggctggatgcggtcactcacgcactggaagcgtatgtatccgtgctggcaaacgaattctctgacggccaggcattacaggcgctgaaactgctgaaagagtttttaccggccagctatcacgaaggtgcgaagaacccggttgcccgtgaacgcgtacataatgccgcgactatcgccggtatcgcgtttgccaacgccttcctcggggtatgtcactccatggcgcacaaactgggctctgagttccatattccgcacggtctggctaatgccctgctcatctgtaacgtcatccgttataacgctaccgataacccgaccaaacagactgcgttcagccagtatgaccgtccgcaggcgcgccgccgttacgcggagattgctgaccatctgcaactgagtgctgccggtgaccgtaccgcgcagaagattgaaaaactgctgatctggctggatgaaatcaaagcatctctggggatcccgaaatccatccgtgaagccggtgtgccggaagccgaattcctggcaaaactggataaactgtccgaagatgcctttgatgaccagtgtaccggtgcaaacccgcgttatccgctgattgcagaattaaaacaaatcatgctggatacctattacggacgcacctatgacgaatctgttcctgttgcggcgccaaaaccgattgccaaacggaatgctaagaaataatcatcaatccggcaaataataaccataaagccctccccggagggcttttttatatccgtctcataataattattaaataattgtctttgtattaacagctgttcacttttgatcatgttttccggaacagccggtttttaatatttcacttaatacccgttacaaaactgtggtaactcccgggggtattcaccggtattttatccctgctgactcaaataccgcctcatcactttccctgcagaaaccgttccggtgttttttgatatccggcgcaatccgcagcggatataaaaaagccggacaatgacgcccggcactttttgtataacagagaggcttccctgatttatgaccgatattctgctgcttttacttcgcgtatcgcttcattgtaatgtttgcggcagacggatacatatttttcattaccgccgatgtcaatttgtgcaccatctgacataacccgcccctgtccgtcgtaacgtaaaacacggctggcttttcgtccgcaataacaaatagtttttaattcaactaatttatccgcccaggctaataaataatggctgccgctgaataactcacctttaaagtctgtgcgtaacccgtaacacagaaccgggatatcaatatcgtcgacgatacagcagagctgttccacctgtgctttggtcaggaactggcattcatcgattaatacgcagtgtacgggtgtctgctgatgttcacggataataaccgagctgacgtccgtctcagggccaaagacccgtgcatcggcgctcaggccgatacgtgaggtgactttgctctgctcatagcggttgtctatctctgcggtaaatatcagcgtgcgcatgccgcgttcattgtagttataggatgactgcagtaacgctgtcgattttcccgcattcattgcggagtaataaaaataaagctgagccaccggctctctccccttacacattcaagatccgggacaatactaacacattagtgttaaaaacagcgcaatctgtatttcacacatgccgtgatcgcatgcacaatatcctgagttcatcgcacacgtaaattcacacaggtcatggttacataccggatattcactgttgttatcaggtatccttcgctttatcctgtttttcattataccgggagcgaagaataacgtttctttacataagataaggttaaatataatttgtattccctaccacatttatgaacaatttttatgaagatgctgaacatcaacgcattttcaccccgtccccttatcaaatttaaacgaaaagccaaaaagacccttattattcctcagaaataattgcttttaaaaaaaatgtgttttaaccttactccgaaatttgctattgcagatttttaaatagcaatctattattatctatacaccagccaacatttaatttgagaccaggattatgagtgaatctttgaagccatttaataatatccgtactcttcgcgctcaggcgagagaatccagcttagaagttttagaagaaattctggaaaagctgacttctgttgttgaagaacgccgtctggaagaatcccaggctcaggctaaagaagaagagcgcacccgtaaattagaagaattccgtcagctgcttgaaaagcagaatatcaacccggaagaattaattcagtctatgggtacaggcaaaacagcccgcaaatccaagcgtgctcagcgccctgccaaatacgaatatatcgatgaaaacggtgaaagcaaaacctggaccggccagggccgtacaccagctgtgatcaaacaagctatcgataacgaaggtaaatctctgaacgatttcttaatcaagtaagtgataatatctgccggaaaagcccttctctgaagggcttttttatatctgccggtcagacggacagcaaaaaggaggctttcgcctcctttttatacttataaccgttgctgttatttatttttttccgtgataaaacgacatataccagtcaacaaactgctgtacgccgtaattaaccggcgtatccggtgagaaaccaatcgttttatacaattcggaggagtctgcacaagtggataacacatcaccatcctgcatatccatatagtgtttgtcagctttaatatccagcgccgtttcaatcgcctgaataaaatcacccagccgggtcggctgaccgttaccgacattataaattttgtacggcgcagagctggctgacttcagcccttcttccaccgtccagtcattatttaccgccggaaccacatccaccagacgcaccaccgcttccgcaatatcaccgacataggtgaaatcgcgcaccatattgccgtggttatacacatcgatcggttttccgtccagcatggctttcacaaacttaaataacgccatatccggacgaccccacgggccgtagacggtgaagaaccgcagaccggttgtcggcagatgataaagatgtgaataactgtgtgacattaattcattggcttttttcgttgccgcatacaacgacaccggatggtccacatcatcctcaacagagaacggctgtttgcggttcagaccgtatacagaacttgaggaggagtagatcagatgcccgacgttatgatgacggcacccttccagaatattcatatgccccagaatattcgcgtcaatatacgccatcgggttctggatggagtaacgcacgcccggctgtgccgccaggtggatcacccgctcaaatttctgtgcggcgaacagctcactgacagccgctttctccgacaaatccattttaaaaaactgaaattgcggatgcggtaataacagatcaagacgggcctgtttgagattcacatcataatagtcattcaggttgtcagcaccgacaacctcgtgcccctgctcaagcaggcgctgcgagacatgataaccaataaaaccagccgcgccggttacaagtattttcatattcagactcagattaccggattaatggaagcaccacggcctataccataatagataaagccgcgattttctaaacgttccgggtcataaaggttacgtccgtcaaaaataaccggggttttcagtcctgctttgatagcatcgaagtccggcgcacggaaactctgccactcagtacagataaccagtgcatccgcattatgcagtgccgcttctttggtacccatcagcgccaggtcatcacgcagcccgaaaatacgctgcgcttcctgcatcgcttccgggtcatacgcctgaactttggcaccggcggcccataattcctgtaacaggatacgactggaggcttcacgcatatcatcggtattcggtttaaaagacaggccccagaccgcgaaggttttaccttccaggttttcaccgaaatgacgtttgataaaggacggcagtttgtatttctgctgttcgttcacttcttccaccgcacgcagaatgcgcggggtaaagccgatatgttccgcggtgcggatcagcgcctgcacgtctttcgggaagcaggaaccgccgtagccgcagcccggataaataaagtgataaccgatacgggagtcagaaccgataccctggcgcacattctcaatatccgcgcccagcatttccgccaggttggagatctcattcataaagctgatttttgtcgccagcatgcagtttgccgcgtatttggtcagctccgcactgcggatatccatcacaatcatgcggtcgtgattacggttaaacggctcatacagttcgcggataatatcgataacacgatcattatcacagccgataacaatgcgctcaggacgcatgcagtcagcaaccgccgccccttccttcaggaattcagggttggacaccacgtcataggcaatatccgcgccgcgttcagccagtgtggctttaatcgtggcgttaactttatccgcggtaccgaccggaacggtggatttatcgataaccactttgtagtcctgcatatgctgtgcaatagtacgggcaaccgcggtgacatattgcagatccgcagagccgtcttcatccggcggtgtaccgaccgcgatgaattgcagtgtgccgtgtgccacacccagtgccgcatccgtggtgaagcttaaacggccttcttcatagtttttcttcaccagcggggtcaggcccggttcaaaaatcgggatcacaccatttttcaggttttccactttttttgcatcaacatcgacacacatgacatcatggccgacttccgccagtacagtcgcctgcaccagaccgacatatccgattccaaatacggttactttcatagttcacctattgcaacaattattaattctgtaatgttttcagccagtctgagaattcacggcccaggtgcttatgacgcatgctgtactcgacaaaggctttcatatagcccattttgtcgccgcagtcatggctgcggcctaccagacggtacgcctccaccggatttttttcaatcagcatggcgatagcgtcagtcagctggatctcatcaccggcccccggggcagttttccccagcagcggccagatatcctgggaaagcacataacgcccgacgatagacatattcgacggtgctttagccggttccggtttttccaccacggcaaacatcggtttgctttcaccggcggccaggctttcaccgtggcaatccaccacgccgtaatttgccaccatttcctgcggaaccggatcgaccattacctggcttgcaccgtgttcttcataacgcgcgatcatttctctgaggttgaatttcgtcaggtcagtgctgtattcgtcaataatcacatccggcaataccacggcgaaaggctcatcaccaatcattggtctggcgcataatacggcgtgaccaagtcctttggcgatcccctgacgggtctgcatgatagtaacgtgacgcgggcagattgactgaacttcatccagcaactgacgttttacacgtttttccaggatggcttccagttcaaagctggtatcgaaatggttttcaatggagttttttgatgagtgggtcactaaaataatttcagtgatccccgccgcgatacattcattcaccacatactgaataagcggtttatccaccagcggcagcatttctttcggaatcgcttttgtggccggcagcatacgtgttcctaatcctgcaaccgggatcacagccttgtgtactttatttttctgcactgacatacatcatcctcaatgcgcataaacagaataaatacgcgatttataaaaaataatgagactgagtataccagctaattttccgggataaatactctgtgccgcgtaaatgcggtttagtgttaagagatgtttaatatctgaacgggttggtaaagtccggtaattatccctgatgcggtccgggggtcaggcttaatttaatctgactgctgctgttccagatccggcattgcagatggcggctgaattcacttatctgactggaataaacagaagagagtgtccccagcggaataccccggttaacgcggatcacatgattgtcagagcgtaattccgcactgataccggcactggacaataacaccgacttacgccgggtgtgataataccccagcagcagcggcagctgtcccggaatacctgcgtcctgtaataaccggttcagcttatttaagatggcggtcatgctcggtaatttccggtggtgattatgaatatagcgttttagcagatcgttaaagatgacgcggattaacatcgccatcagcgggccgttgccggtattctgactgatatcgagacaataaaacgccacttcattatcagaaaattctgccacatcaaataccagccccgcccggcagctatcagataattgcgcatagcggatctgataattggccagcacctggctcggcggcggattcagctgttttaataaacgtaaaacatcatccacattatgttgtaactgagcccagatcccggagagatcattattttccagcacccccggtgagaaaaatgacggatacaggtgggacaaacataattttttcacttcttccagcctgttcaggggttttaacaacacatcttttgccccgagacgcagcacttcatcgatatccgacattttttgtgtcgcagagataacaatcaccggaatggccggtaaatccgactgtgaccgggcaataaattccgcgccggtcatcaccggcatattgaggtcacagaaaatcagttccggctgaaagccctgttctatacattcccatgcgcgcgcaccgtcaccggcagataacaccgtggcaccgagaaggcgcagataggatgacagcgccatattgaatgccgggtcgtcatcgatgactaacaatcgttttccgtccagtgcctgcttcatcgcatcccctttctgcccggcctcacaacccagcgtgcccggaacaccgggaatgccgctgctcccgcactgctgctgagattaaggatagcgtgtgatcgctatttccggtagcatctgagctctgttccttacgattatttaccctgaacacattatttgataattatgtctcattttacagataccgatccctgcccgtgcggcagcggggatacttttgcacagtgttgccagccttatctttccggtgcgcagtccgcccccgatgcgcgggcactgatgcgttcgcgttacagtgcgtttgtcacccataatgctgatcatctgatccggacatggtatccgccggcacgcgcggaagcactgcggacagaactgaccgctgggttcggtgaaacagaatggctgggactgaatgtcattgattttcagcccggcaccgcgccggacgaggctttcgttgaattttgtgcttgctttattgataaaaagtccgaagataaacaattcattcacgaacgttcccgttttcgcctgactgacggtggctggatgtacctcgacggcgtaaaaccacagaccggccgtaatgatccctgcccctgcggctccggaaaaaaatataaaaaatgctgtgcctgacaccggacaggcaccttctgtaaacaaacatcaccgacatcagttattaaggatccacaccttccatgcaacacctgacgagccagaaaaaaattctgcgaaccatttgccctgacgcaaaaggtcttatcgccaagatcaccaatatttgttacaagcatcagctcaatattgtccagaacaatgaattcgttgatcaccgtaccggccgcttttttatgcgcaccgagctggaagggatttttaacgatgaaaccctgctggccgacctggatgatgccctgccgaaaggctccacacgcgaattaaccaccgccggacgccgccgcattgtcattatggtgaccaaagaagcacactgcctcggcgatatcctgatgaaaagcgcctacggcggtctggatgttgaaattgcagcggttatcggcaaccacgatctgctgtctcatctggtcacacagtttggtattccgttccatcatatcagccacgacggactgacccgtgagcagcatgatatgcagatcattcagcagattgatcagtatcagccggattacgtcgtgctggcgaaatacatgcgtgtgctgaccccggcatttgtgcagcactatccgaaccagattatcaacatccaccactccttcctgccggcctttatcggcgcacggccttatcatcaggcatatgagcgcggcgtgaagattatcggtgccaccgcgcactatgtgaatgataacctcgacgaaggtccgatcattcaccagagcgtgattaacgtcgaccacacttacagcgccgatgatatggtcatggccggtcgtgacgtggaaaaaaatgtgctcagccatgccctggggcgtgttctgacacaacgggtattcgtttacggtaaccgtacagtcattttataacggcttaattgcctgaagttgcacggttaacgtgcacttcgggcaaaaaaacaacgaccacacattttttctctttttttactttacagcgtccgcatatttgctattatgcagcccgtcccaaggcaacagctgaacggacagacaatttgatttttggtgggatacccaagcggccaaagggagcagactgtaaatctgccgtcacagacttcgaaggttcgaatccttctcccaccaccatctctcttctctcctgttatttcatattctcaatacaatccattattttgttcagcacactcgcgtgtgatttcgatttgtacagataacaatgattttccgcctcactctgcgataacggcagaaaaatcagctcatcgctgtacggcagcgttttcgggtgttcgtcaataaagcagagataatctccgtcaatcagcagatgcagataactgttcacattatcgatcagatgcacatgttcatgtttgctctgctcaccgtgctgcagcaataatgttttgagtaacgggctttcatataataacggctcacataaccagacacaggaggataataatgtctgtaaattgttatcacagtcctgaaacagtgaacgacggcagcaaattccgatttgtccctgcggtaagtggcgcagcagcctaaaacgttcgctgataacctgctctgacgacagtatcagcgtattgccctcgaaatcatttatttcatcaatacaatcatagtggaaacgaaatatattaaggaaggtgcgatttaatcagtcatgacgatccagagcctggatatcctccttacgcggcaaagtaagcaccccagtttggacaatatttaatctcccccatcaactcagggtaagcaaaatgtcactgctccactgatattacaatgattttcacgacatccccgccagttgtcccgcccgcaccaaattgcacattgcaaacagcattgaaagccggttgtggttcttcatcagtccccgtaatcgtgttttgctgaaaccaaactggcacttcagtatccggaaaggatgctcaacctttgccctaatacctgctttcacatattcatcatgcagcgcctgcttattcagccggggatgctgtctgagcttttttacggcatgaggacctttggcaataaaccactctttaacccgatgtgtcagagagtcccgtttttctgccccgcgatatccggcatcggcgaagacaattgctaccggctccgtaatcaggctatccgccgcattcaggtcatgcacatttgccgccgtggtcactactttttccgtcaagcctgtggccgcatcaacagcaatatgagctttcataccaaagtaccactgatttcccttgcgggtctgatgcatttcaggatcccgttgaccggctttattttttacggaacagggagcggaaataatggtcgcatcgataatgatgccctgacgtaacatcagtccggcctgcttcagtttctggttaatcagtgccagtatctgttctcctgcatgatgtttctccagaaaatggcggaaattcatgatggttgtgcgatctggcaccgtgtcacagatccccgcaaattgacggaacggcaggacatcatgcagggcgtcttcagccgctccgtcactgaggtcaaaccagagttgcaggcagtggatacggagcataagcaccagggggaaaggccgtcggccgcgacgggatgacggatagacgtgaagcagcttatcagcaatatcctgccacggcaccagaacattcatacggtcaagaaaacgggatttacgggaggaatagctggaaatggcaggcattgtaaacagctcatgataaagaaagctttatgttctcacatatgacgattaaatcgcaccttccttaatttgtatacctgctttgaatgccgtccggtacagtgcagcaatatatttacttttcccccagtcataaaatatattcaccttattacatatcgttccactgatatgttttttggtgatttctttttcctgcatataaagatccttaagatcattgtacaactccattccttcccgcgtcaggctcataccaaatttttcgcgtttaaataaacgcttacccagcgagatctcaaagtccttgatagacttcgccaccggcggggttgtcctgttcatcacttttgctgccttgctgagtgagccgtattcaacaacggccataaaggcttctaacttccttgaaaaaaacataatatcgattcctgtgctgtagtaaataatcagttaaataattacttattgatatgtaacgactttatttctggtgtttttttcttacacaaagagtttaaatacgatttttattaaaatttatacaataacaataatgcaatgttatatttttattattctgttttattaaatttcattttaaagattaatacataaacactaaaatcttccttccgatttttatcacacccatttcatttcactgtacagaagaaagaataatcattattaatgctgattattttgtcaattaaaattaagatatattaacccctgccgggtgtgccggtttttattattctgccggcgggttactttttttctgcgatctgttactcttttgttgttaactcatcaaccggttggaattctatgaagtttgtctcttttaacattaacgggttaagagcccggcctcaccagctggaagcgattatcgcacagcatcagcctgatgttatcggcctccaggaaaccaaagtccatgacgagatgttcccgctcgatgacctgaaacacctcggctaccacattttttatcacggtcagaaatcccattacggcgtcgccctgctgaccaaagcagagccgcttgccgtgcgcaaaggcttcgccggggatgatgaagatgcccagcgccgtctgattatggcggatattgataccccggccggggtactgacagtgattaacggttatttcccccagggagagagccgcgaccacccgctgaaattcccggcgaaaaccaaattttatcaggacttacaggactacctgtccgggcgctccaaccaggatccgattgttattatgggtgatatgaatatcagcccgcaggatattgatatcggaattggtgacgccaaccgcaaacgctggctgaagaccggcaaatgctctttcctgccggaagagcgcgagtggatggatcgcctgctcagctggggactgactgacacttaccgcgcgatgtatccggatgcagacgaccgtttctcgtggttcgattaccgttcacgcggctttgatgacaaccggggactgcggattgacctgattctggcaagcaactcgctggcaccacgctgtaccgccaccggcattgattatgaaatccgtggtatggaaaaaccctctgaccacgcgccaatctgggctgaatttgatttaacccgctgataaaaaaatgtcccgcagtgcgggacattttttattcttcttcctgtagcggcgctttttttccgccggtcttccctttgcccttcgcagcggttttacctttgcctttcgcgccggccttcttcgcctgcggcggtggtggtaaatcacggaaagcacggacattccggttctgccgggcctggtttatcagcccggtcagtgtttcagacaacggcaccataaaatcctgataacgatactgtttttcactgatttgtgtcagtgtggattcccagtgcgccgtcatatccggtaaggtggccatttcgggcagaacatgaatcagtgcgcgccctgccggggacgaatgaatattccgcccttttttgtacaaaaactcgcggcggaacagcagttcgataatcccggcgcgggtcgcttcagtgcccagtccgtcagtttcgcgcagtacttttttcagcgccttatctttcacaaaccgggcaatcccggtcattgctgacagcagcgtggcatcggtaaagggtctcggcggctgagtctgacgctccaccacttcaccgcgctcacacaggagttcatcccctttggtcagcaccggcagcggtgtaccttcgttttcctcgtcacgctctttggcacccagcatggtccgccagcctgcctgagaaaggaaacgcgcctttgccacaaatttgccgttggcgatatccagctcaatcacgcatttgcggtattgtgcatccggcataaactgcatcagatactgacgcgcgatcagctcgtagatattggcttcattctcactgagcgacacggagaccgatttggcggtcggaatgatggcgtggtgcgcatcgacctttttgtcgtcccagcagcggttacgctgcgaatcatcgaggttatcctgcggcagcagatgcggggtatgcacagaaatcgcattgaacacactgtgacgcccggcaaaatgctcttccggcagatgacggctgtccgaacggggataggtaatcagtttgtgggtttcatacagacgctgacagatatccagcactgcctgggcgctcagcccgtagcgtttggcagcctcaatctgtaacgcagacagtgaaaacggcagcggcgcgatttcattttccgttttatcctgaaaatcggtcacaaaggccggtttaccggtgatgcggctgaccacatgctccgccagcggccggtgagtcaggcgtccttcgtcatcctgataatcctggcacgcctcgctcggcacccacattgccgtaaaacgttcgtccgccggggtaacaatatgtgcccgtacctcaaagaaatcgcgcggcacaaagttttcaatttcctcatcacgccgcaccaccagcccgagcaccggggtctgcacccggccgaccgaaagcacaccgttataccccgcattacggccgagaatagtgtaagcgcgtgtcatattgatgccgtagagccagtctgcccgtgcccgtgccagtgccgaaacacacagcgggataaaatcacggttaagacgcattttatccactgcccgggttaccgcctgcgggttaaggtcattgaccagacagcgctgcacctgctgacgtttttccggcgcgagctccaggaaatccagtacctcatccaccagcaactgcccttcgcgatcggggtctccggcgtggataacttccgttgcggaactgagcagcgtaccgatggtgcgcagttgtttcgccaccgcgtcgcggggtctgaggatccatttttgcgggataatcggcagatcagccaggttccagcgggcataacgcggatcatacgcatccggctctgcctgttccagcagatggccgacacaccaggtcacacagtcattctgaccacagcggataaagccgtccccccgctggtgcggtttgggtaatacatccgcaatcgcacgggcgaggctgggcttttcggcaataaacaaacgcatgtttatgcggtgacttcaatcagtgcacgggatgcgtccggctcagtcagttcaccgaccgggcttaatgtcaggccgtatttgcgggcaactgcctccacttcctcacgcgccgccggatcaaccgccagcagcaggccgccggatgtctgcggatcacacagcagtttgcgctgaacgtcggtcatttcaccgataaggtggccgtagctgtcaaagttacgctgtgtgccgcccgggcagcaaccctgtgcaatatagtcatacacaccaggcagtaccggaacagaatcggtgtggattacggcctgtaacccggaaccctgacaaatttcactcaggtggccgagcagaccgaagccggtcacgtcggtcatagcttttacgccgtcgatttcagagaagtccgcacccggtttattgagctgacacatggtgtcacgcgccagatttttatgttccggacgcagtttgctctgtttttcagccgtagtcagaatgccgatacccagcggtttggtcagcagcagctgacaaccggcttttgcacggttattttgtttaattttatctgtcgggacaataccggtgaccgccaggccgaaaatcggctcaggcgcatcaatagagtggccgcccgccagtgaaataccggcatcgcggcagacagctcgtccgccctcaatcacctgttgtgcaatttccggagcaagtttggcgaccggccagccgaggatcgcaatagccataatcggcttgccgcccatagcataaatatcactgatggcgttggtggccgcgatacggccgaaatcatacgggtcatccacaatcggcataaagaaatcggtggtgctgatgatgccggtaccattaccgatatcatacaccgccgcatcatcacgggattcattgccgaccagcagattaggatcgataaattttgcctgctcactgtgcaggatggtgtcgagcactttcggggaaattttacagccgcaacctgcgccgtgactgtattgcgttaaacgcaccgcttctgacatgatagtctccttgttaacgtcaatccgctcagaaatacgtgacaaacggtgtcagatccggtgccgccactttggcaggcgctttcagtgccggagtgccgagatacagaaagccgacaattttatcgtgctcctcacatcccagaccttcccgtaccaccgggtcctttgtccacgaaccggtgcgccagatcccgccgaagccctgagccacagcagccatctgcatcgcatgaaccgaacaacctgccgctgcaacctgctcccattcaggaactttatgttccggcttcactttcgcgataaccgtgataatcagcggtgcgcgtaatggcgcattgcgggctttctcttccacttccggcccgagcccggctgtttttgccgctttttcgagcaactgactgaatttgatgatgccgtcatcctgcatcacgataaaatgccagggctgtaacgcgccatgatccggcgcacgcatcccggcattgagaatattttttaatgcttcgccttcgggcgcaggtgtggtcagacgagaagcagaacggcgattgagtagtaatgtcagtgcatccatcggttttccccttttttagtcgctaataagctaccacttttttcactatttttaaggatagattgcttaactgcctatattttccgcaatgtgtcgttttcaggctgacaaatccgcacatcctctttacgatagcaggacatctttgtctttggagccgtcatgcatactttatggactatcattgccggaatatttaaatggagctggcgtttactgaattttgtgcgtcagcttgtcgccaatgtcctttttatcatcatactgctgttagccgccggggcctatgcactgctgagtgagcaggatactcagaccagccgtgaacccggagcattatatgtaaatctttccggcgttgtcgtcgatcagctgacccgtaacagtccgctggaaagtctctctctccaattgcttggcgcgtcttccggtcagttacaggaaaactccctgtttgatgtggtggaaactatccgtaccgccgccaccgacccggatattaccggaatgatcctgaagctggatgatttcgttggtgctgaccaaccgtcacttcagtatatcggcaaaaccatcacggaattccgcaaacagggtaagcgggtctatgccgtcagcggcaattataatcaggctcaatactacctggcatcctatgcagacaagatatatatgccgccgcagggcagcgtcggtatctacggcttcgccaccaatacgctgtattataacgaattgctggaaatgctgaaggtgaaaacccatatcttccgcgtcggtacctataaatcagcggttgagccgatgctgcgcaatgatatgtcaccggaagcccgcgaatccacacagcgttttatcagtgtgctgtgggataactatctcaccagtctcgcggaaaaccgcaaaaccggtaagaacaccattttcccgggcgcacagcagatgctggctctgatgaaaacggcaaaaggtgataatgccgcttatgccgtcacgcaaaaactggttgatgagattatgccggctaacgtgtttgaatccgaaatgaccaaaactttcggctgggataagaaaaacaacacaatcaatgcgattccgtttaccgagtacgccaaaaacatgaacatcggcgtgccgcagggcaagaccaccggtaacatcgccgtggttgtggttcagggtgctatcgttgacggtcccgatgccccgggcatggccggcagtgatactatcgccgcacaactccgcgaagcccgtctggatccggaagtgaaagcgctggtactgcgggtgaacagcccgggcggcagtgtgacggcatcggagcagatccgtgcggaagtcgcggcactgaaacagagcggcaaggccgtggtggtttccatgggcggcgtggcagcttccggcggttactgggtctcaacaccggcaaactacattgttgcctcaccgagcaccattaccggctccatcggtattttcggcgtagtcaccacgtttgaggactcgctgagcgaaatcggcgtgcacactgacggcgtgtccacctcgccgctggccgatgccaccgtaaccaaagcactgacaccggaattctcagagctgatgcagctctatattgaaagcggctacagcaattttattaatctcgttgccaaatcccgtcacaagacgccggaggaagtggataaaattgcgcagggtcgtgtttgggtcggttcagatgccaaagctaacggtctggtcgacaaactcggtgattttgatgacgcggttgccaaagccgcagagctggcctctgttgagcatccggtactgaactggatgcagccggaaatgacattcattgacagactgcttgcggaaacggccggtaatgtgaaggtgacactgccgtcatcattgcagggactgatcccggcaccggtcggcgcacagctgacacaacaggcatcctttatgaaaatgctgacggatccgcagtaccgttatgcattctgcttaaattgcaccaatattcagtaagttttcttctcagctgacaaaagcctgttcgtgacgaacaggcttttttttatttctgaagcccctataatttccttccctgtactcattgttaagagcagtaacatgcaaaagaaatccatttatgtggtctataccggcgggactatcggtatgcagcactcggcgcagggctatatccctgtttccggccaccttcagcgccaggttgccaaaatgccggagttcttccgtccggagatgccggatttcaccatcaccgagcaccagccgctgattgactcttccgatatgacaccggatgactggcagtgtatcgcggatgatatcaaagcccagtatgaccactatgatggtttcgttatcctgcatggtacggataccatggcgttcaccgcatcagcgctctcctttatgtttgagaacctgaccaagccggtcattgtgacagggtcacaaatcccgcttgaggcactgcgctcagatggccagatcaatctgcttaatgccctttatctggcggcgaattatccggtcaatgaagtgggattattcttcaataaccgcttataccggggcaaccgcaccgtcaaagcacatgctgacggttttgcggcctttacctccccgaactacccgccgctgatggaagccgggattaatatccgcaatctcaatactcacccgctgccgcagagcaccgcacctttcacgctgcataacatcaccccgcagcctatcggcgtggtaaccgtgtatccgggcttgtcggtggatgtggtgaacaacattctgcagcagccggtcaaagcactgattatccgctcttacggtgtcggtaatgcaccgcagcaaccgaaactgctcaccgcattgcgggaggccacagagcgcggcatcattgtgatcaatctgacacagtgtatttcaggacgcgtcaatatgggcggctatgccaccggtcatgcactggcagaagccggcgtgatcagcggctttgatatgaccttcgaggcagcgctgaccaaactgcattatctgctcagccaggattacaccagcgatgagatccgcattctgatgcagcaggatctgcgcggcgagctgagctataacgacaactaaggagtctgcaatgaaaccggcactgcttctggtggatattcagaatgatttttgtcagggcggcagcctggctgtccgcgacagtgatgcggtgatccgcacagcgaaccggatgatagcccgttgtcagcaacagaatatcccggtgatcgccagtcaggactggcatccggctgagcatctgagctttgccgtcaattccgggacagtgattggtgaatgcggcgaactgaacggactgccccaagtctggtggccggtgcattgtgtgcagaacacaccgggggcggattttcatcctgacctgaataaacaggctatcagccatattatttataagggtgaaaaccaggccacggacagttacagcgcgttttatgataacgatcaccgggagccgaccgccctgctgcaactgctggcagaactgaagatcacgcatctcgctgttctgggaattgccaccgattactgcgttaaatttacggtgctggatgccctggcggaaggatttgccgtcactgtgatcacagacggctgccggggtgttaatttacagccggatgacagcctcaccgcatttgcggagatggagaacgccggtgcgcggttgcagacagcggctcagttctgcggcgagaaagaatagcaaatgtcatgacgggacagtaaacactgtcccgttttacactcagtcctgcggtttcagtgtggccagatgcgtatcggtaaacagcgctttcagctcctgcttacttttcaggctgatttccccgtcagtccccaccgtcatatgtgccggatccgcgttatggcgggactgccatagcatcaccagctgcagactgctgcttttctgagattccgtcagtggtacaccatcggcccatttacccagttcgacggctgtcaccagacgcccgtagacttccggcgtcatggcggacaataaatcatcaatttccatacaactccttccccgaaagcatctgattttaccttttgatcacatcagaagctgaatcgttttttctatcgttatataaatgttaaatttcaatataaccaaactaaccgtttgttattgcttttgttttttcatcttcaaaactcagtgatgctgagttaatacaataacgctgccctgttggcgcaggcccgtcaggaaaaacatgtcccagatgcgcatcacaatggccgcaacgggtctcaatacgatgcatgccatgagaggtatcgtcaatataccggactgcacttttgctgaccggctcataaaaactcggccagccgcagccggcatcaaacttggtatccgaataaaaaagcggagaaccacaacaaatacaacggtataccccctgtttctcattatagagcaggcggccggtaaacgggtgctcagttcccgcttcctgtgtgacatagcgctgaatctctgtcagctcagcgggtgtatcccgctttttatcagtcccggacatagctgaatccttatcattattgtgcagggtcagtcagaatacagaataacaaaaaattaacatcaaatgaccggatgttattctaaacttgtcatgtcagcattgacaccacttatttgtgacatgtttcacatttatgccccatacacgctgtctttattccgctaagtcccgataatagcggcgacaaatttactgaaagtggcgatttgttgagcagattaaatgttaaatgacattaattgacacgattccgcttgacggctggcaaggttttggtaactttagtagcaactttaattcactaacaaatagctggtggtaatactatgactatcaaagtaggtattaatggttttggtcgtatcggccgtattgtattccgtgctgcacaagagcgttcagatatcgaaatcgttgcaatcaacgacctgctcgatgcagattacatggcatacatgctgaagtacgactcaactcacggtcgttttaacggtaccgttgaagtgaaagatggccatctggttgttaatggtaaaactatccgcgttacctccgaacgtgaccctgcgaacctgaagtggaacgaagccggtgttgatgttgttgctgaagcaaccggtctgttcctgactgacgaaactgcacgcaaacacatccaggcaggcgcgaagaaagtcgttctgaccggtccttccaaagatgcgaccccgatgtttgttatgggtgttaaccacaaagattacgcgggccaggaaatcgtttctaacgcatcctgtaccactaactgcctggcaccactggcaaaagtcatcaacgacaaattcggtatcgttgaaggtctgatgaccactgttcacgcaaccactgccacccagaaaactgttgacggtccttcacacaaagactggcgcggcggccgcggtgcatcccagaacatcatcccgtcttctaccggcgcagcaaaagcagtgggcaaagttatccctgcactgaacggtaaactgaccggtatgtctttccgtgttcctacgcctaacgtctctgttgttgacctgacagtccgtctggaaaaagcagcaacttacgctgaaatctgtgaagctatcaaagcggcagcagcaggcgagctgaaaggcgtaatgggttacaccgaagatgacgtggtttccactgacttcaatggcgaagtactgacttctgtgttcgatgccaaagccggtatcgcactgaacgacaactttgtgaaactggtttcctggtatgacaacgaaaccggttattctcataaagttctggatctgattgcacacatctccaaataagtctgcactctgttatcctcacaaagagccgcttttgcggctcttttgttttgtggtaaacagtcgtaaagtagaaagtaaatgtcctgtttttattacaaaagggtaaattatgattgagcgccttcttgcgttaccggttaccagtccgatcaccccttcgctgtcccagcgtcagatgggggatttgccggttattgtgatcgaccatccgaaagtccgtgctgcggtcagttttcagggagcacaggtgctggcatggcaaccggccggttcagaacagccgggattatggctcagtgaaaacagtgcatttaccccgggtgtggccatccgcggcgggatcccgatctgctggccgtggttcggcccggtgcaggcgccttcccacggttttgcccgtattatgcagtgggagttcacggctcataatgaaaatgaagagggtgtatttctgacctttaccctgcgtgacagtgctgaaacccgcaaattgtggccgcacgagttcacactgatcgcccgcatccgcctgggagacacctgtgaggttgagctggaagcttacgggcagtatcaggcaaccgctgcactgcatacctattttaccgtcggcgatattgcacaggtcagtatcagcgggctggggcagcatctgctggataatctgtcacagcgtgaagaatatacggaagagacaaagctggttttcaacggccgtaccgaccgcatctataccgagccggagcaatccacctatatccacgataagaaattaaaacgtcatattgaagtggtgcactttcatcacagcgatgtggtgtgctggaaccccggtgcagcattgtccgcttcaatggccgatatgccggatgacggttataaaacaatggtgtgtgccgaaagtgcgcggattaaccgtcctatggcaccgcagggcgataaaccgtcccatctctctgtacgtatccgtctgaacccgaaaatcggctgacgggctgcacaggaacacataaggccggtgaatgattaccggctttcatataccgttgtcagcagcggcgaatcaaacatagccaccggcgaaatcaccgtttcatccagcggaactgcctttccgtaccgttctttcatctttgcctgtacttccggcgaggataaatcaaattcccgtaatgtctgtaactgaccgacctctgtattcagggcatttttatagattttccagaccagttccgaacaataaatccgctcatcatcccatgaaaatgtcaggtcataaggccgggactgataccggatcgcttcacggtacaatgcctgctgctgtgatgcactcagttgatttttcaggcgtttcaccacgtaatggttaccggtgccgcgcgcaatccactgtttcagcggtgtaaagcggactgtttttgccgcctcatacacatacggcttaccgtcacgcagcagaataatccccatatggctgtagaccgaccctgtcgctttttgtatagcgatgctctgagaggagcgcgaggtatggaaaataatatcgccctgctgcggctgccacgcgtacacggcggaggtaaaaaaacagagcaacagcagacaatgacgcaacacactgatcacaagagccctccggcatggttaacagccataaaaaaactgcaccggacacaggtcgggtgcagttctgttataccactgaattatcagaaagtataagtcacaccagtccacaggatagaggtgtgttttttatccaccatcgggctgtctttggcctcacttggtaacaggtcgatacggcccatcgcgaatgcagaccagttttcatcaaactgataatgaccggacacctcaacatacggtgtccagctgctgcccggacggtattcatccagaccgctgcggcgggattcagcagcagtgatcccgtattcataacggttctgtttttcgctggaccagatcacacccacgcccggctggacagaccatttgtcgccctcaaacccgtaaaggtaagcggcatcaaaacgcataccgtcacttttacccaggatatccccggagaagttggtacgcagtgttccccactcttcatgatggcggtagctcagcccggccatggcagtatcgcggcggttatcgagcttgcgcatacgggaatctttattatctttggcacggtatgcctgcggatagtagaacaggtcaacagacagctgatcttttttgtcattccacagataataaccggtcgctaaggtatgaaaataaaagtttttaccttcatagttaaccatcggaaccggcataaatttatcagatgtttttgtgccgcggtatgcctgctcctgatagagtacggaagcaccgacagaccattttccgtcatctgcaaaggcagaggctgacatgacagttaacatactgagactgagcaggccggttaatttcttatgcattatcatttcctgagttaaattcatgtacaaattatcgcaacaaatgtttgcggggcgcatatattacggtgaatgataattcagcgatgataaaaattacaaatatttactgtgctaaatcgtgccaccggtttcagttaagtaatgtcattgccgcgataagtgcctgacctgccgctattccgccatctccacatggcaactgacggggttcccgcacctgtctgtggcttaatctgtccttaataatacggcgcagcaaccggttattaaacacgccgccggagagcacgatggtatccgtatttttccgggttgctgtatcatccgccagcccggcaaccgtatttgccagcagtacatgaaaacggaatgctctttccggtattgtctgagtatcatccgccagcatctgccagagcggacgtaaattaatagtgttatccgcagtcagcggcagtgtttcaccggtaataagctcattctggttgtgacactgtaacgcgcaattttccagcgcacaggcggcttccccttcccagcttatctgatctgcggttaatccgagcgcacaggccactgcatcaaacaaacgcccgcaggatgatgctttcggggcattgataccctgctcaatggctttaatcagtaatgatacattcttcccggcaagccgcgatgccagtggtgaagacggccacaaaccggcgtgatacagatgagccagcaggttacgccacggctgcaccgccgctttgtcgccccccggcaaactcacggccggtaacccgccggtacgggtcatatgacggtaatcacccgccaggatttcaccgccccatagtgtgttatccgcgccgtatccgaggccgtccagtgctatccctacgacttcaccatcttcctgacgccagccatgttctgccagacaggctgcaatatgcgcgtgatgatgataaaccggcatgaacggcacctgatgcgcctgtgccagtgccatccccatctgatgactgatatagccgggatgcgcatccccggcgataacctgtggtttgaactgataaatccgctcaaacagtttcagcgaagcctccagttgcccctgtacggagagatcagccaaatccccgagatgcggcccggtaatcagctgctgatgatgcagcaggcagaaggtgtttttcaggtcaccacccagtgccagaactgccggcggatttttgccggtcactgtgctgacatcgatagcatccggcacataaccgcgcgcgcgccgcagcacctgaatatcaccggactgatagcggacaagggaatcatccgcccgctgaataatttcgcggttatgtaacaaaaaagcatcggcaatggaactgagctgctcaaatgccgctgcgtgatccagcgccggagtatggcctgatgcattcccggaggtcataatcagcgggcgctgaatatcatgcagcaacaggtgctgtaacggattagacggcagcataatgccggtttcacacaatcccggtgcgaccagcggagacaatgcggcgattacttccggttcatctgtcagcacaatcggtgcggcagggcttttcagcagggtaatcaggccgggatccggcttcctgcctgtgcattccgccagccagtcaacggacggtatcatcaccgcaaatggcttggcaggccggtgtttgcgggctctcagtacggccacagcgtcactgttttgtgcatcagccaccaggtgaaagccacccagtccctgcatcgccagaattttgccgtctttcagcaaacggactgcggctgacagagcatcatcaaagcgggcggtaatctgctgctgcggatccgtcagccagatatgcggtccgcaatccggacaggcattcggctgagcatggaagcggcgatctgccgggtcacggtattcatgctgacacaccggacaaaacggaaaaaccgacatcgcggtattcggacgatcatacggcattcccctgataatggtgaaacggggcccgcagtgtgtgcagttaataaaaggataacggtaacggcggttgccgggggcaaacaattcactcagacaaacatcacaggttgctgcgtccgggataatttcggtatccatttccccctgtccgctggcggtgatggtaaatgccgccggacactgttcaaaggtataatgctgctgcccgatatggtcgattcgcgccagcggcgggcattgtgcctgtaaccggctgataaaaccggcgatatccgcttctgccggaaggtggataagcaccccttcactgtcattgctgacatcaccgcacaatcccatctgatgggctatctgccagacagccggacgaaacccgactccctgaacttttcccttcacccggatttccacacccgcctgcataacgcactcctgcctgatttcaaccggaacagtttactgcgcacagagtggccgggtatttatcaggatcataaaaacagccggaaagacgtataattacccggcagtgatcaccggtacccgccgtgccagcgctgtcagcagttcgtagccgatagtcccggcatattgtgcgacatcatccgccggaagattcgcgccccacaattcaaccggtgtaccgatatccgcctccggacagcgggtgatatcaactgtcagcatatccatggagatccgtcccgccagcgggcagcgctgtccggcaatccagaccggtgtgccgtccggtgcatggcgcggataaccatccgcataaccacaggcaatggtggcaatccgcatcggtgccgcggcggtaaaacgactgccataacccacggtttcaccggcttcaatatcatgaacagcaataatttcactgcggagagtcatcgccggtttcaggccgaactctgcaatatccgcactgttgccgctgggtgaaacaccatagaggatgataccgcagcgcacttcatccgcgcgggtgtccggttcccacatggccgctgcggaatttgccagacactgcggtaagttcagagaactgaacagtgcaatgcgcgacatctgtttatgaataccggcagttaaatccgcatccgcaaaatggctcatcagtgtgatagtgccgacctgtggtaatactgtcagacgctggagtgcattcaggtacgccgccggagaaaaacccaatcggttcatgccgctgttcagtttcagatacacattcagcggatgaataaatgaagcttcctctatcgctttaatctgccactcgctgtgtacagatgttgacagttgataacggtcaatcagtgacagatcttctggctgaaaaaatccctccagcagcaaaaccggcttttgccagcccagttcacgaaccttcactgcctcactgaaatccagcagcgcaatgccctccgcctgcgccagtgccggaaaaatccgttcaatgccatgtccgtatgcatccgcttttaccactgcccatacccgggacgggctgacccgctcttttacccgggccagattatagcggacagcttcactgtcaatcacagcctgtatcggacgaggcataaaattaccgctccttattttgttggttatgcggtatgtaactgctgcgggatcaccagccgggttctgaacccgttcagataacgggatactgccagatcatccgcccggattgccggtttatcgccggacataatatcggcaagcaactgcccgctgccgcaggccattgtccagccgagggtgccgtggccggtattgaggaacagattactgtacgcagtcggcccgacaatcggggtgccgtccggtgtcatcgggcgcagaccggtccagaaagtggctttgctgatatccccgccgccgccgtaaagatcctgcaccaccattttcagtgtttcgcagcgccgtctgacaatatcaaggttaaaaccaaccacttctgccatgccgccgacacggatacgctggtcaaaacgggtcaccgcaattttgtaggtttcatccagtaccgtggatgcaggagcacggctttcgtcaataatcggcatggtcagagaataacctttcagcggatacaccgggatagcgatatggccgtgcagtaattttgtcgagtatgaccccagcgccaccacatactggtcaccggtgatcacttcctcgtcgcaaatcaccccgctgacacgatcaccgctgaattgcaggcgatgtatattgacaccgaagcggaatttcactccggcctgctccgccatttctgccagccttttggtgaacaaattacagtccccggtttcatcattcggcagttgcaggccacccgccagtttatgttccgcatgggccagcgccggttctgcctcatgcagttcaccggcactcagcaggcggtacgccacgccttcctgtttcagaactgcaatatcattggctgcgttatccagctgtttttgtgtgcggaatagttgcagtgtgccaccctgacgcccctcatactgtattccggtttctgcgcgtaatgctttcatgcagtcacggctgtattccgcaatccgtaccatacggcttttattcatgacgtaataatcagcgccgcaattgcgcagcatctgccacatccagcgcagctggaacagcgaaccatccggcctgatggccagcggtgcatgtttttcaaacatccatttcacggctttcagcggaatacccggagcaccccacggcgtggcataaccgggagagatttgcccggcattaccgaagctggtttcttccgccgccgccggctgcctgtcgataacagtcacatcgtgccctttctgcgcgagataccaggctgttgtgacaccgataacaccacttcccaggatgacaatgttcatgttgccgccttgttatttatttcacattagcatcagcataatatttcagaaacattttgccaacatagcggaatcccctcacgtcatattaagtctgtttctttgctgcctgtcacaaaacagtattttttttaatcactgatataattaattaaattatccttttatccgaaaatggttttattatcttgtaatataagcatttgttaaatagtatgcagtctatctgtcgcaggcaccgctgcgaactcatcgcgaaacgcaaccggacacccgtctttgttgccgatgacaccagactgaataaataatccgtatatttacgttacgccggttatttatcagaaaacccctcttcttttttatgccttccggcatattttccggtaataacgatgaatattaaaaaccaacgtaaaaacatcaccctcttacccgacggccgccgcttcagttggtatgactccggccctgagaccggtattccggttgtgttctgtactggtgcaggcatgagtggctctgccggcttcggtattccttacctggcagacaataatatccggctgatcacaccggatcgccccgggctcggtaattcttctcccgatgccggaaaatcaccggaatcctttgccgctgatgtcacttttctgatgcagtcgctgggttacacccggttcagagcagccggattctctcagggtgcggtttatgccatggcactggcctattatgcgcaagtttccgcgctggcactgatttccgggcaggatcagttcgattacccgccaacccgggcgctgttatctgctgatatcattgatatgcagaagaacgcacggactcagcctgacgggtttacctcatgggtacgggaaaatatcaccgcagactggctgatgagtttcattctgaactacagcggggaaacagacctggcagtttatcaggcggcagattttttacccgcttaccggcagtgtatgacagaggcattttctcagggaaatgaaggctatacacaggatctgctgattgccatgcaggaatggggatttacaccggagcaaattacctgtccggtgtcactgtggtacggggaaaaggacaccagtaccgtgcactccccggatggcggcaaaatcctggcgggacgctttccccgcgcggagcatcatctgtttgcggaagaaggtggctccctgctctggacacagtcacaggcgatattacaggcactggcccgcgcataacaaaaaaccggctcagcgccggtttttcatcatatacagtctgtgttactgcggattcagatcctgtgcaatgccgctctgcatggtctgccagatagtaccgctctctttgccgtagctgcggacacaatccagcactttatcataggctttttcgcggcacaggccggtcagctgctgataaaaattccgcgccagtttacgggcttccgggcttgcgaaatagaagcggccgacacgggtgtacaaccctttcagaccgttgaggatcagaccgtaaatcgggttaccagaggcaaatgccaggccgcggaacacgtcataatcatactggctgaacgcatcggaattatcatccggttcattttcctgactgagaatttccagtgatttttccggattattgcgaaacgcagtacggataaaaatagaggcaatattggtcctggctgccagcaggttctcaatcagtttcggcgcgctttcgtgatcgagacgggcaatggtttccaggatgttcagtccggatgtttcccagaaattattaatttttgtcggtttaccgtgctgaatcgtcagccagccatctctggcaaggcgttgtaacacttcacgcagggttgtccgggtcacaccaatcagttcagataactcacgctctgcgggtaaaatggatcccggcggaaagcggttattccagatactttcaataatatactcttctgcaaaccccgcagggctctgcgccttgatgaccataggtgacttcgtccaaaacaattaaccttccaattatccggatgataacagaatgtgacgctgcgatatagcaatcagcttgcgaaagagtgaatccggtcataaatcacaatggtacaacctgtgaccatcagttgatttaaattcttaataaattcagaataccggcgtagtataaagcactgtagttatacgcggatcatcttttcaccccctgcggaggacacacagcaacaatggaaatatcaatgcggcaggccttcctgaagaacttcatgggtcactcccctgactggtataagcttgctattattctttttttaattataaatccggttgtttacttctttattgacccttttacagccggctggctgctggtcattgagtttattttcacccttgcgatggcgctgaaatgctatccgctgcaacccggcggcctgctggcgattgaggcggtactgatcggcatgacatcgccggcgcaaatcagccatgagattgtgaataaccttgaggttatcctgctgctgatctttatggttgccggtatttactttatgaagcagctgctgctgtttctgtttaccaaactgctcctgtctatccgttccaaacgcgcgctttctcttgctttctgtctggcaagtgcctttttatccgcgtttctggatgcactgacggtgatcgccgtggtgatcagtgtgtctgtcgggttttatgcgatttatcatcagtatgcctcttccggaaaagaaacggtgacgctcagtgatgatgaatttatcgacagcaccgaaaagcgccagacactcgaccagttccgcgcctttctgcgcagcctgatgatgcatgccggtatcggtactgctctcggcggcgtgatgaccatggtcggtgaaccgcagaacctgattattgccaaacatgccggatgggatttcgtgaatttcttcctgcgcatggcgccggtaacaattccggtatttgtctgtggtctgctggtctgctacctggtggaacggtttaaactgttcggttacggtgcggaactgccggagcgggtaagagccgtactggaggataatgcacaaaaatctgcagcacgccggacaaaacaggaaaaaatgcagctgattgttcagggccttatcggtatctggctgattactgcgctggctctgcatctcgccgaagtcggacttatcggtttatcagtgattattctggcgacggcattctgcgggatcacggaagaacatgctctcggtgaggctttcgaagaagcactgccgtttaccgcactgctgactgtgtttttctccgtcgttgcggtaattgttgaccagaaattattcacaccgtttatccagttcgttctcagttcggatccgtcgtcgcagttgtcgctgttctacctgttcaacggcctgctttcggcggtctctgataacgtctttgtcggcacggtctatatcaatgaggcaatgacggcgatgaaagccggactggtatcctatacacagtatgaatatctggccgttgctatcaataccgggacaaacctgccgtcagtggcgacaccaaacggccaggcggcattcctgttcctgctgacgtccgcactggcaccgctgatccggctttcctacggaaaaatggtgatcatggcgctgccttataccatcgtgatgacactggtcggtttcttcggtgttgaattatggctggtgccggtttcagaatggatggctgccaatggtgtaattacactgccgtaaccacctttttacactgcactaaccggaataacagtgttattccggtttttttgtttctgcccgccgtaaatgcggaaaaggggtgcgttgctgtattttttatcgtacagtcgctgcgttagttaatctgtttcttattaatcggataacccggatacaattatgctgacttatctttatgagtgttcgcggggccgcagtgcatggtttttactgatgatctccgcactggcactcgacggtatcgccctgttctttcagcacggaatgggattacagccgtgtgtgatgtgtatttatgaacgtattgccgttctgggcattgcctttgccggattcctgggctggatagcgccgcgcagcgccattatccgctggctggctattgtcctgtggatttacagcgggattgccggattacagctgtcatgggaacacaccatgatccagctctacccgtctccgttcaatacctgtgatttctttgtgaatttcccggaatggctgccgctcaatacctggctgccgtcagtgtttgaagcatccggtgactgtgccgttcagcagtgggtattcctgaaactggatatgccgcagtggcttatcggtatctttgctgtatatctgctgatcagtgcgctggtattattatcccagttcattcaccgcaaacagccgcgtcgcctgttctgatcttacccaatcaataacagccgcgttatcataacgcggctgttcagagcatctctcacaataccgatccgcaacttccggaaagcagtgactgctgactgcagcgtttgccgttggcaaactgacaccccggtgtctgtgcgccgttcagctcgcggataagtgacggcgttccgcctgcatagctgcagctggcacgggcatcttcggttaaatcaattaacggttgctgatagcgcgggatctgtttctgctgcaccgtatccggtgaactgctgcaacccgcagcaaaagccgctgccgcaacaataacactgcacaatacccgccccggacggcggagaaatggaactgatatcatgattatggcctcatagctgcggatgcagctcagtgaacactgcttttcgagaataaatttatcactaatacacccgcaataatgagagccatcccgataactgcgggtaaatccagtttctggtgatagataaaataagcggcggcagagacaatcacaatccccattccggaccagatagcatacgctatccccagcggcatcatccgcaccacctgagacagtgcccagaacgacacacaataaccgataaccaccacgaccgacggtatcagccgggtaaaaccgtccgccgcccgtaacattgaggtcgccaccacttctgcgcccacggccagcgtcagccacaataaaccattcataaatcacccgttcatatctttatcactcagtaaggcggatattataaagaaatcagaaaaaaaatcccgcagcgaaacggtgcgggatatgattaatttatgacggattatgcgaggtaatacggctctccgctttcggcctttgtataaacaaggcccggtaacggctgaaaacaaacagtgagataagcacacccgccacagcaaacaccgccccggcataacctatctgttccattcccatatgaataatcacctgattaccaagcagcgccccgccgccgataccgatattaaaaatgcccgaataaacagacatcgccagatcggtggcatccggtgacaaatcgatcactttgacctgtaatcccagcgcggtacacatcataccgatcccccagacaaccccgaggataatcagcgcggtatcggtcacgcggctggtcatcagcagcatcaggcataccgtcagtagtgttatcgcagcaggcagaaacagcagcggcagccgggtgttgtaacggctgaaaatcacactgccgataatccccgcagccccgaaaatcagcagaaacagcgtggcgaaatcctgtgacttcccggcaacggtctgcacaaacggctcaatatagttataagcagtgaaatgcccggttaccacaatcgcggtcagcacaaaaatccccactaacgccggtcgtctgaacaaaaccggaatacttttcagggagccggaatgctcactcggcagcagcggaagaaaacgcgccattgccgccatggtaatcaacgccagaccgccgatacagaagaacgtcatccgccagccgacccactgcccgataacacggccaatcggcagccccaacacggttgccagcgccgtaccggtcgccagcaaccctagtgcctgagattttttaccgggaggagccaccctgacagccagcgatgcggtgatcgaccagaacaccgcatgtgccagtgcgacaccgatccggctgaccaccagcacatcaaaacgctgcgccagcccggacactatgtggcttatcacaaatacggtaaacaaccagagcagcaatttgcgccgctcaatacgcgccgtcagcagcatcagcggcagcgacgtcagcgccaccacccaggcataaatggtgatcatcagtccggtctctgcgggttgcatcgaaaaacccgccgagatatcactcagcagtgcaaccggaataaattcagtggtattaaatacaaatgccgccaccgcaagtaccattacccgcagccaggcctgatttcgtgacagggtttcagtcattatggtcccccgtaaagaaaagctgtatcgatacagcttttgagcagaaaagtgtgaccatggtaacacatgtggttttcacgggaaacgagggaacagaagcaaatgcccggcatcagcgccgggcaaacgcattataacgcgcgttttgactgttccgggatggcatcaaaaatcgcttttaactgtgcttttttcagtgtcggcccgacaatacggacacggcggctgtttgccggatgatagctaagaatataagagtccgtggaaaacgagaccattaacgccttcagccccttcacttcctgcagggagaaatggccgccgtcaaacggcattgcgaccactttaccgaccgcgattttggatgtcagtttatcgccgtacactttaatcaccgggaactgcgcgatatagacatataccgtgagacccagtgcggcagccacacccggcatccgtgtctgaaataaatacgccagtgcgatataaagcacaataaccacaaagaatgtaatgacacaggtgataattctgcgtttctgatcaacctgatataccgtttctgctgaactcataacccatcctgttactgaatttccactgccggaaaataaaaaaatctcaaggccggacagaataacgaaaataccggcgattgacagtaacattccgggaaaaaatcattcctgcgtactctgcggaaatcccggaaaccggggatttacaatccggcatttatttgacaccattgccgcagttcatttcccctgaggatgtctgccgacatgatttaattgcctgaatcccattgctgtatcatccgcatttttactaatgcgctgttttgatatcgggcaggcagctatcctcgtcatcattttcttttttatccggcatatccgcctgcccctgtttattcaggagcttttgtatgtccgtacaatgccatttttctcacttatcagtgacatttaacgatattccgctgtttgacaacatcagcggcacattaacccgtcaggttcaggggttgaccggtcataacgggcgcggtaaatccgtgctgatgtcgctgctcgcgcagcagcggcaaccggcctccggtacgatcagctggcaggtgccgttttattatgtgccgcagctgacccgcctttccggtatcacactggcggatgctctcggaaccgcagaaattctggccgcactgcgccgcacagaggacggcaccgccaccgcagaggattatgattttctggcggataaatgggatatgccacgacaacaacaatccctgctggaaagtgcgcagctggcgcatctcccggcggacaccctctgcacaagtctgagcggcggtgagcaaacccggctggcactctgccgtgcctttttacagccgtgtgccttcctgttactggacgaacccggaaaccatctggatgccgccggacgccgctggctcggtgagcaactgcggaatcatccggccggcgcactggtgatcagccacgagcgccgcttgctcgacaccatgcagcggatttttgaactcactccatctgctctggaagagtacggcggcaattacacccattatgccgagcagaaagcctttcagctcagcgcattacagagtgaggagaagcagttacagtcacagctgaacagagaaaaaacggagttacagcgcacactggaaaagaaagcacagcgccgccgtcagggcgagaaagtccgttcatccggctcctcctctgccctgctgctggatatgaaaaagaacaaagcggagaagcagcaatcaaaaataaccggccgtcatgaccgtgttatgactcagcttgacagccagcgccgggaagtaaatgagaaaatacagcatatcaccccgcagatgctggcctttaattataccggcgagcaaaaacgggtgcggatcaatacccgtgatctgattttgccgtccggcacacaagagcctctgtcactgaccatttccggtggtgaacactggcatattgccgggcgcaacggctgcggaaaatccacattactgaaagtactggcgggcctgctcacggcaaaatccggggagtactccctgcacggccgtctgcgatatctggatcagcacctggcgctgctgaataaagccctgccggtcacagaagcactgtgcgagtttgatccggccattccggcacaaacctggcgcacccatctgggtgcattgcggatccggggtgataaggggttaattccgctgtcacagttaagcggcggtgaacaactgaaagtcacattgctggcattaacattatccgaacctttgccggatattttattactggatgagccggataaccacctggatctcgattcccggttattactggaaaatgtactgcgcagttataaaggggcattattactggtcagtcatgatgaggcatttactgaaaattgtgccattacccatacactggcattatcctgaaaaagaatacggcggtaatcccgccgtattactacagtttacagatattcacgataacataacgtgccgcgttaatattatgctttgccgcatcggcggcagcggcattattaaacagcgcgataaaacgttccgcttccgttctgctgatatcggtattaatagccacatggctgcggaataataccgagccggttaaccccagaccttcataacacaatatatttatccatatccttctgaattccctgcaatgataactatttactatcatagtgtgtattaccggccggggttatcagtatttccttaaactgacagccagtgctgttattttaacgcccgcccttctttggcacccaacggggtatgaagttgtgacggcacgaatacaccggtgctgtcattacgtccctgcaataatactttggcgtctttctgaccatgctctttcactgccttttttgataactgcccgataatggtatccggtgaacgcaggcggttaataatcagcaccacctccgtatccgggaagtcagacatcatattctggtcgccttcactgtcaccggcgactaataacggccctttaccggcatatttatcctgaataaacttgcggatagtctctgttttccctttaccctgagtctgcggataaaccggatccagctcggatgtcagtttgttatctttggtgcgcagtaaatgcatggcaaatacctgtgactccggtacagaatacggtggttgtgtgacaatcgatttaatcacttccaggttcgacgcggaaatcacatagacatcaataccggatttttgcagcacctgatacaagtcctgcatttccggtaccagacggaaaccattatgccagtcaatttcaacaatacccgcctgtcccggtaacgattcagggctttcccataccacaccttcaaccggctctgatttctgccattcaatggtcttggcggtaatatccgcaacctgctctggtgtcatattcataaataaataggtgacccacggataggaaaccgcatgatcaaatgtgccgccgattgccgcatataaataacgcattttggtgatgaaattctgataatgcggcgactttttgatttcagacagtggcttatcacccttcaggccatcatagttgtcatacagccactggtagctttccagaatatcggcgccgaccttctcaatattgaccggtttaccgtttttattgttgaactcagcggaaaaattaccagccggaatatctttgaaaataacggatttcagttcctgcggtgtcatggcaaataacagatgctcaagctgataaatcaacaccgcttcttcaatatccagaaatgccgtggtgttatcaaagtcaaacaccgcataataggtatgtaccggtgactgttttactttggcgatcatggcatccaggcgctgtttattaaaactgtcccactgcccctgttgtaataccgctatttctgtcacagcctgcggtgctgcggcagcattcagggaaacagtctcagcctgtgccgtcatattcagtgataacataccaacagccagtgcaattgcactgtaacgattaataaatttcattgataatcccctttgaaataaaaaaactaataaaagggataccacaggctatttttttgctgtatcaaaaatcagcaacggctgacattaagcgaaactgatcacattcttttaccggggctgttccgcctgttacgtgatattatcaggccagtcacaaaccggttatttacagcggataaattcatgagtaatcactttgatggtaaatacgaagcggaaataaaatatcgcctggctgatcatagcgcttttttgtcgcaattaagcacaatgcatgccgagccttttgtggtaaataacgaagaaacagactggtttttcgatacgcagcaaacgcatctggcagacggtaatgtcagtatgtcagtcagaacaatgacgccctcgggtattaagctgtggatagtgaaaggccccgccgccagcgaatgcaaagctatcaatattgatgaccatgagcatgtcagaaatatgctgctgacgctgggttaccgctgcacaatgaccttaacaaaaacccgcagtgtctggtttctcggtgatattcatatcacactggatcatattaacggcgcaggatggtttgccgagtttgccattatgacgcacgatgaaaccaaattagcagaatacagggaacggctgcgggagaaagccgcagaatttggtctgacagacgatatgattgaaaaacagagttataaacaactggttagttcaatgcagaaaaacaactgtaacgcagaataaataaaaaacggtgctgaatcatagtgataatattcagcaccgcaagtaccggtttatttcagtgtatacatggtcagcacagtataagtgacatctttttcatcatttatctgtaccagattggcattactgaccacccccaccacaacctcggtatcttctgattcatatttgcgcttgaactgcccgatttttcctttggcgacttttgccaggaacggtgttttgcgatcatattcttcatttatcccggccggtttgccgtagattttctccatttccgcattcactttatcgtactcattcagtaatgcggcctgatcatggctccagacaccgaagcgggatattgcatttaatttttgcccttccggtgaaaagaccatcataaagaattgcttttcaacctccggtgatgccagtgagctgcataattgcccgccatcacgggtttttgtgcagtcaaaatcgtccagattcagggcttttaattctgcgggcgtctgcccccatgtaaagccccagggtgcttccggtgttttacttcctatacctgcgcagccggataataatgcggccataatccctgacagaataaattttctcattgccccgcccgtatacattgagttacttattactgatcataccaaagaccggcaagtgaccagaagccttactgtcgctttattcatcaaaatcagatttgatgaagatgttactgcgtaattatacgctttattcagcagatatccggtatatatacccggagccgcacgatttaatcagccaggcggatatcaagcacccgcagcagattcagggcttcgtatgcggaaaatgtggctttggcagttttattttcacggatatcgatataaaaagagtgagagccggaaagatccgccccttccagattagtgtgcataaacagtgtgtcggttaaatcgcagtcatgcataacggatttattcagctccgcctgtctgaaatcggcattatggatccggcaggactcaaagtgcgattcatgcaatctgaggtcaaaaaagttattactgtccaaaatgcactctttgaacaccagctgagaataaaaatcaaacttcggccagtatgcttttgtccagtcaataccaatcattttcgttccggtaaattcagtgccggaaaaccgggtttccggaacggccagcagactcatattgcactgctcaaacacacagtcagtgaaacggcactgctgcgcaaccgccgagctgaaatcacagcggataaaggtgcagtcctcaaacaccacaccacggattgtctgatcactgagatcggctttttcaaaccggctgccggtatactcatgattattctcaataactgtcattatccctctccgccggtgtgttgttttattctcagttgctccctgtaaatctcctgattttcacggatagtatttacggtgctgtttttataagggtcatcgttattcttttcatatttttccggttgtgtaccctctgaaacacatccggacagaatcagtacaataaacaggcccggtatttttttagtcactctgttattccttttaataatatggctacgtgaataaacggatattacgcaccaatacgtaatctgtattggtacaatttaaccattttacacaacattcagattattctaccttttaaaaaagggaaatgctgtaaaccttcacaccagcataaatcatatgattttcgcagatgaggtaagtatgtctgtcagcaataagactgtttattctgtatgctccagattaaccctgatggttatgaagctgaccggccttgagcgggttattactgtcggccagtattttgagcgggcaacagataaatcactccttcagcgactgattgaagaaaacagagatctcagcacaccgttctcagcactggataagacaaacaaggattgcaaaattgagctgattgaatatctgaatacggcaatccgtgaatacgctgcatccgaaataaaggaaaactacgctgcactgaaaaacggtaatctgctggttgtaaaaacattcaatacggttatgcaaaatcacgcttaaattttatccgttctcatggctgtcacagggatctgttgtcagccataacatatattccggtgaccttactgatgcattgaatgattaaaagaaggtaataacgaataatatcgcaggtttttattacttccatcccggacggttgcattattgttataattgtttccattcagatacaaacaagcgtttaatttttcctcctcataacgaattatcatttttaataaacaatactccggtatgaacggaaaagaacaaaaagagaatatcattatcaacacaatgaaataaaagatatttttgagttaatcatgactcataaaagtaaagaaaaacaaaacattaagatattaaaactaaagatattgatgcttttgccgttatcttttcaatcccccggcggatatctgatttttacaattacacatctttttgtgacgagcggaaacacagggtcatacactctgtaaatcttttagttttacttattgttatataattatctgcacaaaggcatactattgtcgtaaatgttgacatattccattattataattacaaaaagaatatcatcatattgccctctcttcagtaaaacccgcaaaatgcgtataactacaacacagaagtgttatttgtcacatcaccagaaattggttttgttttcttctttaaaatcaaatgaatgcataaaaaatcaagccaatttattccttttttatatgcgttgtaatatctgcatatttccagtttttaattttactttttattcttttgtacatttttattgcggattttatttattgacaaccattataaggcttgcatattatgcacaatatactgtttttgccttgcagatatttcctataatagtatttaaaatatacattaagtttaatgacgtcctgatggtatctttatgcagcccgataattgccacgcacttagttgtcaacaccaggtctttaaaaaggagcttcatgcagttataggccaggaaattagaatattacgaaaatcaaaaggtatcaccggccatgaattaggttcaataatacagctatcgcagcagcagatatcccgttacgagaatggtgacagtgctattccgctggatacactgatattaatactgcgtatttttaatatatcgccggaaaaatttatacacagagtgttatttatcttaaacagagatcctgattcaaaaaaactattatcccatatgtcgaatcatcttaattcttatactgacggcagttatctgggaacatttgaacaatataaacacaattaacataattactatatttaagattacacacagcttttaatttaagggcatagcatatgaatgagagagaaatcagcctctttatcggtcagcaaatttcacggaaaagaaaatcgctgggattatcaggtatggcacttgccgaattactgggtttaagtcagcagcaaatatcccgctatgaacagggcattaccaatataagagccagtacattactgcaaatcgcttttttgtttaatgttgatgtaaaaagtttttttactgattgtatcgaaaaaaacagcaaactgagttcacttaactataaagagaaaaagagtcaggaaacagactatgacacgatcactattgatatgaagagcagaggaaggggtaaaatccgcagtaaaaaataaccataccagagagtaccagcagcccgcccccgtcatcccggatcattccgttccgggctgtcatcctttttaatccatacgtatccgaatcccccgtccttctgctatcattgcgtccttatttcagatttccgttgccgtgcggccggcctgacacaggcaccagccaaacccgttaagaacagtaagacatgaatacaccgaaagaacagtacaacatcaataaattgcaaaagcgcctgcgcagccataccggcaaagcaatcgcagattttaatatgattgaggacggcgaccgcatcatggtttgcctgtccggcggcaaagacagttacactctgctttccattctgcagagcctgcagcagagcgcccccatccgtttttccctggtggcggtgaatctcgatcagaagcaaccgggtttccctgagcatattttgccggaatatctggaaaaactgggcgttgaatataaaatcgtcgaagaaaatacctacgggattgtgaaagaaaaaatcccggaagggaaaaccacctgttccctctgctcccgtctgcgccggggcattttgtaccgcaccgcaactgagctgggtgcaaccaaaatcgcccttggccaccaccgcgacgatattctgcagaccctgttcctgaatatgttttacggcggcaaactcaaaggcatgccgccgaagctgatgagtgacgacggtaaacatgtggtgatccgcccgctggcctattgccgtgagaaagatattgagcgtttcgccgaagccaaagggttcccgatcattccgtgtaacctgtgcggctctcagccgaacctgcagcgtcaggttatcaaagatctgctgcgcgactgggataaacgctatccgggccggattgaaaccatgttccgtgccacacagaatgtcgtatcatcacatttatgtgacactgaattattcgatttcaaatctatccatcacggcagtgaagtcgtcgacggtggtgatctcgcatttgaccgcgaaactctgcctgttcagccggtatgggaagatgaggatgatgacggcgatagcccggatttcacagaattacgtctggatgtgacggaagtgaaataatcacgctgttatagtgccgtgccacggagggtacggcctgaatattggcgggtttgtttcaggcaaaaaaaaaaccgatgtataaaatacaccggcatgataatggtcaatattctgtataagaactcaatatgagaaaaactacaattatggagcacaacgttcatcgctcaacgttgtattcacctgcgggagtaatagtgccctaaccgggcgtggtatttcttgatatagctcaagtccggtacgtaaaatcatataaaaatacacgtttttacaaccagttactcttacgtaaccaccaggcaacaaatccgataacacccgccagtcccacacagaacaaactgaaagcaaacgggaaatcgccccccgggatcccgccgaggttgaccccgaacaatccggtcagaaaggttgtcggcagaaaaaccatcgccagcagtgacatggtgtaagtacgccggttcatcgcatccgccatcatattggtgatttcatccgagataaccgatgtccgcgcgatacaggagtcaatatcgtcaataatccgccccaggcggtcactgacatccgtcagctgatgtctgtcctgctctgagagccaggtgtaacgctcggaggccagccgggaaaacacatcgcgctgcggtgccatgtagcggcgcaggacaatcagctgcttgcgcagcagtgccagctccccgcgggccggaatatgctgatcgagtatcgcatcttccatatcaatcagggtatcgtgtaagtcctcaataaaatctgccacttcgtcggtgatgcagaacgccgcttccgccagccattctccggtattttttgcaccttcaccgttttgtaaatcatcctgaatggtctgaatggaatgcactttacggtggcgggtggagataatataactgccgcagatccagatacggaatgccaccagttggtcaggccggtcgccgtcattattgttgatggtttgcagggtaattaatgcaccctcaccaatacggagtgtcctggggcggataacattgtttgtcagcccgtcacgcgcctgcggcggcaacagttccgtttcacgcagccagcgctggttatccgcggataaatagtccaggtgcagccacaccggttcttttatcccggcaacggcgttgacatccaccggcgtacaaccgccctctccgtcaaactgcacccggcagatgggatctgttccctgaaaagcggatccgtacaaagcgctcatgcgtctctccccattgtccgtgaaaacagctgctgagtgtgttcagccggttcctgcagccgtccgcagcagggaaccggaggcagggttagtgtttaataatatagagattatggctgtatgccacatcttccggattattgaccggatatcccttcagccacggtttaatcagacgtccgttggtgtactggtagattggtgctatcggcatgtcttccgccagcagtttttcggcgtcgttatagtcggtattacgggcgttatcatccgtttccagcgcagcagttttcagcagagcatcatatttttcattatgatactgcgcgatattgccgctgtgtgtgctggtcagcagagacaggaaggttgacggctcgttgtaatcgccgacccaggaggcgcggatcacatcaaaattgccggtattgcggctgtcgatataggttttccattcctgattgaccagcttcacttccgcgcccagttttttcttccacatcgaaccgacggcaatggcaattttctgatggttttccgagctgttatacagcagagataatttcagcggattgtgcggcccgtaaccggcggcggccagcagcgtttttgcctggctgtcgagctcatcctgagtaaatttctggtacaggcccggctccggtgtaaacccggcagtgacatccggcgtgaaatgccaggccggtttttcgcccgtgcccagcactttctctgcgatcaccttacggtcaatggtcatggaaagtgcctgccgcacacgcgggtcgtttgtcggtgcccgctgcgtgttaaaggcgtaataataggtgccaagctgatccgggatataaatctgatccggaatcgcctgtttcagtttctgatactgatttttcgggaatgattccgtaatgtcgagatcattggacagatagcgtttggtggcctgggattcatggttaatcggcacaaaggtaaccgatgtcagcaccgtgtgtttgtgatcccagtaatgcgggttcggcgtcagaacaattttctcattcaccaccctatcatgcaggacaaatgccccgttgccgaccagatgcccggtgcggatccaactgtcgccgtatttctcaacaaccgcgcgattcacagggaaaaggctgaaattggccgccagattcgggaagtacggcacaggacggtctaacgtgacccgcagagtccggttgtcaacagcttcaacgccgagggtttccggcagcattttgccgtcgataatcgcctgcgcatttttaatgccggccagcggtgcaaaccaggcgaaggtagagagatttttcgggttaaccagccgctgccagctgtagacaaagtcctgtgcggtcaccggtgagccgtcagaccagcgggcatcgtcacgcaggcggaatgtccatacctgattgttgcgggtctcccaggagagagcgacaccgggcaccggtttgccgtccgcaccctgactggtcagcccttcaaataaatcacgcaggatctgagcttcggtcagaccgaccgctttaatcgggtccagagacgcgggttcatccttcagatgacgataaacagattgttcttttgccagctgtgttcctgcggggatctccgccgccgttgcacaaaacagtgaagaaaacgtgaaaaacgtcccggcaagaagtgcggaacgggaaaattttgctggcctgaacataacgggcgccttgtattaaaaatggtaaaccgatagattatctgatgattaccgaaacacaacaaccggatattacatttttattaacgatatccggtgagaaaacacctgccaggtattatttataccaacaattatgagcccgttcagaggatgataaaaatgacacaaactgtaaaacttcagggtaacgatgttctggtttacggcgcactgctgcgtgccggtgaaaaagccgtaccatttaaattagtcgctaatgatttgtcagatgtccagctcaccaaattcgccgggaagcgtaagattctgaatattttcccgagtgtggacaccggtgtctgcgccacctcagtgcgtaaattcaatgaaactgccgcaaaactgtccaataccgtggtgttatgtatttccgctgatctgccgttcgcgcagtcccgtttctgcggcgcggaaggtattgagaatgtggtgatgctctccaccctgcgtgatccggaattccgtgaaaattacggtgtcggtatcggcagcggcccgctggccggtctgtgcgcccgtgcggtgatcgtactggatgagaacgatactgtgatttacagccagctggtcggtgaaatcaccgaagagccggattatgacagcgcgctgaatgcactgaaataagttacccgtatctgtaaaaaaaccccgcggccggtgacggtcgcgggattttttttaccggggaaaaaattattcttcctctccctcatcatcttttgccgcgctgcgccgctgactcagcccgtattcgcgcagtttattggcgatcgcggtatgtgagacattcaggcgtttcgccagcttacgggtgctcggatagtggcggtacagccgtgtcagcacagagcactcaaaccgtttggtgatatcatccagcgagccgctgaggatatcctcactgaagccgatttccgcttccagttccggcagaacgatgtcctgcggacgcagcagcgagccttccagcgaagagagcgcctgataaatcacattacgcagctgacggacgttgcccggccagtgataagcacaaaggaactgccccagctccggcgccaggcgcggttcttcacaaccctgctcttcggaaaagcgtttcacgaaatcgcgggtcagcggcaggatatcttcctgatgctcgcgcagcggcggaatggtcagcgtcagcacattgaggcggtaatagagatcctcacggaatttgccctctttcaccagctccagcagatttttctgggtcgcacagataacccgcacatccactttcacctcatgctcttccccgacacggcggaatgtaccgtcattcaggaagcgcagcagcttgatctgcatctgcggggacatttccgcgatttcatccagcagaacggtgccgccgttagcctgctcaaagaagccttttttcggctcagtactgttggcgtaagcaccggcagcgtaaccgaacagttcggtttccaccacatcatccggcatcgaggcacagttcagcccgaggaacggctgattgccgcgcacactgtagagatgacaggctttggcaaacacatctttcccggtcccggtttcaccgaccagcagcagcggggaatccatttttgccatacgctgtgcctgttcgaccacatggcgcattttggcgcttttcgccactaaatcatcaaaactgccggaatgcatcacctgcatgcggcgtttctgcccgttgctgctctcactgacggtgcgcagcagcacaaccgcgccgatagtggcggaggcgtcatctttctcatcaaaattaatcggcgtcacactcagggtgtaagagcggcctttgagattgatggtttccttgtatggcgcaggttcttcatcctcaatccagcgggtgaagttgaactggctgaaatagtaagtgatattgcgctgacggatgcgctcttcggtggtggcaaacagggagagtgccgcgctgttggccagttcaatattcccgcgcaggtcgagagataaaatcgggtcttccagggattcgagtaatgcccacatggcgcgctgttcgcgctcagacggcataaagtgaacagttctgacatccaccacgccctgaatccggcggatctcagccatcagagactggaacacagaaaaatcgatctgcataaaattgaggtatatccggccgttacgggcaatttcgatgcctttgaggtcgatattttgtaataccagcagatccaataactcccgcgtcagtccgattcggtcctggcaaattacttccaatcgcatcgttacgatcctatttacacttaagttattattttcccgttaattgaaactgattttacggtataaaatgaaaactgtcacgatttgttgacacaataaatgcgttcctgcggtgtttatccacagttccgtgtgaaaaggctatgaaagtacagatatgtcagtcggttaacgaagttttattcagcgcggacggcaaaccgcgccggagaggtgagacagcgacccgcagggagcataacgggatcgctgtgaaaaaaacagtgaccggacacccgtttctgcataaaaaagccggatgacatcacaaaatgcgcatccggccggattatcggttacagggcggacttttccgcgctcttcccttttggcactgcctgtttaagctgctgtaacaactgcttacggaaatccataagtttaggtttatctgttgcagtccacggcagcggacggcacagttccatcgctttgatccccagacgggcggtcagcagtccggctcccatgccttgtgcggcacgggcggataaccgtgcggtgatgtcctgagagagccagtccatccccacttcgcggataagctcggatgcccctgcgaaggcaatattgagcagaaccagtttaaacagtcgcaggcggctgtaatatcccagctcaataccgtagatagccgccacctggttaatcagacggatattacgccaggcaataaaggccatatccaccagtgccagcgggctgacggcaatcatcagcgcagattccgccgcgaaacggctgatcacccggcgcgcctgttcatccgtcaccggctggacaagctgactgtacagggtcaccacttcgcggtcattatggctgctctgtaacaggctctgccattgctgtaacgcaggatggtgtgacgggatattggcctgtttcgccagtttttcacaaaatgcacgtccgtcaccgatacggtggctttgcagtaattcctctgcggcctcgcgctctgtagcccgctggcgcaggcggtacatgcgccgccattccgtgataacagagccggcggcggcaatcagcaccagaaaagtggcggcaatcccgccaagggcggtccagtcattacctgtccacgcatcattcacccactgaatcagttgtgcgacggcgctgatccccagcaatccgccggccacaaagaccagcttacgccacaggctgcgccggggtttcagtgcctgaatcagcagcgcttccgcttccccgtctgtatcctgctctgccgtgaattccgtgcgttcaaactgtatgctgtcatcgtccgcaaattgttgcgccggttttatggtgtcctgtaccggcggcgacagcggtgcttcctcaaaatcaatacgggatttgataggctcgctcatgacagtttatctcccagtaaaaattccatcgcactgtccatcctgatatgcggcagcggcgtatccatccgcatcggtaatggcctgaaggactcaaactgaaacccctgctgctgccagaagtctgcatccggcagccgtttcggtacttcgccgggatagaaagtcagcggggtattatctgccagccgggtgcctttcagcgcgggcattttttccccgttgtgcatcaccatgccgtattccgtggcctgtaccgacgccagcccggtgcagtccattttaatcccctcaaaagcggcctgctgccaggctgactgcgtcagttgctgaagcagtgccacgagattggcgtgctggtcggcagtgacatgatccgctttgctggcggcgaacagcagtttgtcgatacagggggaaaacaggcggcgcaataatgtgcgtttgccgtaatggaagctctgcatcagctgggtcagcgccagacgcatatccgtaaatgcctgcggcccgctgttgagcggggtcaggcaatccaccagcacaatctggcggtcgaaatgctggaaataatgcttatagaaacctttgaccacatggtcacaatagtactgatagcgatcgcgcagcatgccgagaacactgctttttgccgctttggccagccgggacggatccggcatcaggtcggtaataaacggaaaaaactgtaatccgggtgcgccggccatatcccccggcagcacaaaacgaccgggctggataaagtgaaaacctgccgctttgcagcggtgaagataatcagtataggcctgtgcaatcgctgccagctgctgttcatccgccggggcatccgggtcaagctgacggcagagcgccagccacggctctgcccattctccccgctcacctttgagcagggttttcatctgctgcgaccaggtgaggtaatcctgttccagcatcggcagatccagcagccactcccccggataatcgacgatttccaggtagagcgtggaggtttccttaaagtggcgcagcagactgtcctgagtgcggtaacgcagtttcaggcggatttcgctgacaccgcgtgtcggtaccggccagtccggcggtgtgccgtacagtgaggcaagtccttcatcataggcaaagcgtgggacgcccagatcccgctgcgggatgcgtttcacgccgagaatgcggccgtcacgggcagccgaaaacagcggcagacgcgcaccgctctgtacattcatcagctgattaacaaacgaggtaataaacgcggtcttgccgctgcggctcagtccggtaacggcaagacgaagatgacgatccagcccccggttgacgagggcactcagctcattttgcagtcgtttcataattctccggtgtaaaacggccaatcacttttttcataccggcacggataacaggctccagtaccagtattgccgccccgcgcagagcaggacgggtaaccgatttcagaatcaccgcggcaatacctccgggtgctgccgccagtgctgcggtggttaacagctgcgccccggtttttccggcacgcagcagggtgtgtttatccggccacttcatactgttctccgtctgacagattacaggtcacggaagcggcggttgagcgcatactgttctgaggtcacatagcgctcaatgtcgcggatccgtttttcggtacgcgcctggctgcgttctgtctgttcaagcagcatggccgcattcactcctccgtcgcggccggggtaatcacgcggcaccaccggcaggatcattcccatcagaatatagagggtgatagtcagccagaaaaagccggtaaatgttgccaccaccgcgataatgcggatcatccaggccggtacatcaaaatagttggcaataccggcacatacgccccggaacataccttcatccggatagcggtacagtttgcgtgactgaaattccattatgattgcctccagcccggattttccgcatccagaatcgattccagggttttgatccgcgcttccatctgctgagcattttccgccagcgccgcaagacggcgggtttcaaattcaccggcccggcttccccgctgactgttatagtgcagccataaccagatcggcagcacgaacaacacgaaaattgtcagtggtatacctaaaaatacaaatgccatatttttgtccttaatggtattaattcaggaaagcctgttaccgaccttattcgcccttttcttctttttcaagacgtgctttgatggccgcgatttgcgcgctgatctcatcttccgctttcagctcggcaaactgctgttccagtgatttttctttccccagaccatagcttgcggcttcaccttccatatggtcaatccgcgcctcaaactgctcgaaacgggccattgcctcatccatccggccgctgtcgagctgacggcgcaccgcacgggatgattttgccgcttcgtgacgcaccaccatggattgctggcgggcacgggtttcagtcagtttctgttccagttcgttaatttcatttttcagccgggcgatagtttcgtccagaataatcagctcatgacgcagtgtatcgacatggccttccacgcgctgtttttccagcagtgcggcgcgggccagatcttcttttcctttgacaatcgccagttccgctttttcctgccagtcactcacctgacgctcaccgctttcaatctgacgtgacagatttttgcgttccgcgagggtgcgggcagaggtggagcggatttccaccagcatatcttccatttcctgaatcatcaggcggatcattttctgcggatcttccgctttatccagcagtgatgcaacgttggcgttaatgatatcggcaaaacgtgaaaagattcccatgattgatgtccttttatcagcagttatgtcttatgacacgtttgctattacaagatgcgtgccaactcggtgattttttttacccgtttgttttttctcaggtttatttatttcccttttgtcatgactttttgtaaagtggtaatattcgccatttagtggttaaattaatcatgaaaaataatacggaaaccctgatcggtattgataatacctttctcgatgcactggaaaaagtgtcgcggctggcaaaaattgcccggccggtactgatttgcggagaacgggggaccggtaaagaattatttgctcaccgtcttcattatctctctccgcgctgggatgagccatttattgcactgaattgtgcggcacttaacgataatttgctcgattccgagctgttcgggcatgaatccggggcttttacgggggctcagcgccgccatcagggccgctttgagcgggcggacggcggcacactgtttcttgatgaactgggtaccgcgccgctgaccgtgcaggaaaaactgttgcgggtgattgaatacggggaatttgagcgtgtcggcggacagcagaccctgaaagcggatgtacggattgtctgcgccaccaatgcggatttaccggcgctggcggcagagggaaaattccgccccgatttactcgaccggctggcctttgatgtcgtcaatatcccgccgctgcgcgagcgcccgcgcgacctgaccgaactcgccggtcattttgccgtgcagatgtgtcaggagatgggcacgccgttttttgccggtttttccccgcacgccctgcaacagatgcagaactatcactggccgggcaatatccgtgagctgaaaaatgtgattgagcgatctttgtaccgtcagggagataccaccgaaccgctggcagaattggtgatcaacccgtttgtcaccgcgccggctccttcagcggacgccgccgcacaggctctgccgccgctgccgttctccctgaagcagtggctgcatacacaggagaaggacgcgctggatgccgcattacagcgcgcgcagtttaatcagcgggaagcagcacaattgctgaatctgacctatcatcagtttcgcggattactgaaaaaacatgccggcagcccgcaaccggattaaatgcttccgtttttggttagtcgcacaaattgcgatacaatgccctgttcatttttaacggtaactgatttatgcgccattggattatccgggcctgtgcggttctcctgcctgtttcaggctttgccgccgcacccgccccgcagacagaccagccggtaaaaccggtcacggctcaggccgctccgctgccgccggtccgcgataccggttttgtctattgtgtgaacggcaacatcagtacatttaacccgcagctggccagcagcgggctgattgtcgagccgctggcggcacagatttacgatcgcctgctggatgttgacccttacacctatcgcctgatcccggaactggctgcccgctggacagtgctggataacggcgcgacctaccgtttttatctgcgccgtgataccgattttcagactactgactggtttaaaccgacccgcaaaatgaatgcggatgatgtggtgttcagcttttcccgcgtggtggataaacagaacccgtatcactatatcaacggcggccgctatccttattttgacagtctgcagtttgcgtccaatgttaaatccatccgcaaaatcaataattataccgttgaatttaaactgaatacgccggatgcctccttcctgtggcatctggcaacccattacgcgccggttctgtccaaagagtatgccgataacctgctgaaagcccgccgtcaggaacagctcgactggaaaccggtcggcaccgggccgtattatctggatgattaccagagcggccagtttgtccgtctgcagcgccatgataattaccgcaaaggcaaaccccgcatgcaggaagtggtggttgatctcggggcgggcggcaccggacggatgtcaaaactgatcaccggtgagtgtgatgtgctggcctatcccgccgccagccagctacaggtgctgcgcgatgacccgcgcctgagcctgatgctgcgcccgggaatgaatatcgcgtatctggcgtttaataccagcaaaccgccgtttaataatccgcaggcgcgccgtgcgattgctttcgcaattaataatgagcgcctgatgaaatccatctattacggcacggcggaaactgctgcgtctattctgccgcgcgtctcctgggcgtatgataaccagaccagggtgacggaatataatcccgaaaaagccaaagcaatgctcaatgagctgggactgagcggtatgacgctgaatctctgggtaccgaccgcctcgcagtcttacaaccccagcccgctgaaaatggctgagctgattcaggcggatctggcccgtgtcgggataaaaatgaatatccgcccggttgaggggcgttttcaggaaaacagcctgatggatcgcagccacgatattacccttgcaggctggtcaaccgacagtaatgacccggacagttttttccgtccgctgctcagctgtgcggctatcggttcgcaaaccaatctgagccactggtgttccccggaatttgatgatgtgatccaccaggcgctgcttgagcagcaactgagcagccggattgagtattatcacaaagcacagcagattctggcacaggatctgccggtactgccgctggcctactcactgcggttacaggcattccgctatgatattaaagggctggtactgagcgcattcggtaatacctcttttgccggtgtctaccgtgataccggggatgacccggagccggaggctgaaccatgattatttttattctgcgccgtctgctgctggtgctgatcacgctctgttttctgtcggtgctcagtttcagcctgagttacttcccggcaaatgcaccgctgagcggcgcttctctgacggatgcggtactgttctactataagagtctgttttcatgggacttcggcagttccgtgattaacggtgagccggtcagccagcaattgtgggcagcactgcccgccaccctggagctgtgcggcctggcgtttctgctggcgctggtggtcggtattcccgccgggattattgccggggtctggcgtaataaaatggcggatatcgccatcagcacctttgcgctggtcgggttttcgattcccgtattcgggctggcactgctgcttaccctgttcttctctctgcggctggactggctgccggtctccggacgcattgacctgctgtatgatttaacaccggttaccggatttgcggtgattgatgcctggctgtcggattcaccataccgtcaggcgatgatcctcaatgtgctgtctcacatggtgctgccggtgatcacgctgtccattgcgccgatgacggaagttatccgcctgatgcgcaccagtaccgaagagattatcagccagaactatattaaagccgccgctatccgtggtttatcccggctgaccattatccgccgtcatgtgctgcacaatgcgctgccgccggtgatcccgaaactcgggttacagttttccaccatgctgacgctggcgatggtcacagaagtggtctttaactggccgggaatcggccgctggctgatcaccgcaatccgccagcaggactttgccgcgatttccgccggtgtcatgctggtcggcactatggtgatgattatcaatatgctgtcggatattctgggtgccgtcagcagcccgctgaaacataaggaatggtatgccttcagataatttctaccgtgaagaccggatgccgtcaccggggcgggttatctggcagcatttcactgcagatattccggctatgatcggtttttacggcgtgctgtttctgattgcgctggcgatcggcggcacctggatagccccttatgcgctcgaccagcaatttgccggtcatcagttgctgccgccttcctggtctcattacgggaatgtcgccttcttcctcggtacggatgatctcggccgtgatattttcagccgtctgatcctcggtacacaatccaccttcggcggtgcactgctggttaccgtcattgccgccgtcgccgggattatcatcggctgtctggcagggatgaccaccggtctgcgctcagccatttttaaccatatgtttgataccctgctggcgctgccctctctgctgctggcaattattgtggtggctttttttggcgccagtctcagccacgccatgattgccgtggcactggcactgctgccgcgtattgtgcggatgatttatatcgcagtacatgatgagcttgataaggaatatgttattgccgcccggctcgacggcgcgtccaacctcaatattctgatccatactgtgctgccgaatatcagtgccgtgaccgtcaccgaactgacgcgcgctctgtccattgctatccttgatattgccgcgctcggttttctcgagctgggggcacaactgccgtccccggaatggggagcgatgctcggggattctctggaactgatttatgtggcgccctggaccgtacttctgccgggaaccgccatccttatcagtgttctgctggtgaatctgctcggtaccgggttacagcgtgctattaatgcgggggttgaataatgccgttactggatatccgcaatttaaccattgaatttatgactgccgcagggccggtcaaagccgttgaccgcgtgacattatccctgaccgaaggggagttccgcggcctggccggggaatccggttccggtaaaagtctgatcgccaaagcgattgccggtatcaccaaagataatctgcgcgtaacggcagaccgcttccggtttaatgatatcgatctgctgaaactcacaccccgccagcgccgccgggtgatcggccacaatgtgtcgatgattttccaggagccgcaatcctgtctggatccgtcagaaaatatcggtaaacagctgattcagtccatccccggctggacatacaaaggccgctggtggcaacgctttaactggcgtaagcgccgggcgattgagctgctgcaccgtgtcggtattaaggatcacaaagatgtgatgagcagctacccctacgaactgaccgaaggggaatgccagaaggtgatgattgcaattgcgctggccaatcagccgcgcctgctgatcgccgatgagccgaccaacgccatggagcccgatactcaggcgcagattttccgcctgctgacccggctgaaccagaacaacaatatgaccatcctgctgatcagccacgatttgcagttaatgagccagctggtggatcgcattaatgtgctctactgcggccagaccgtggagagtgccgagccggatgaccttctgctcaaaccccatcacccgtatactcaggcactgatgcgggctatccctgattttgaaaaggcactggcacacaaatgccgcctgaataccctgccgggcgcgattccgtcactggagcatctgccggtcggctgccgcctggggccgcgctgtccgtatgctcagaaagtgtgtattgacgcgccgcgtctgcggacagtcaaaaaccgcagttttgcctgccacttcccgctgaatatggaggatgtgtgatgcccggtccgctgctggaagtcaaaaacctgagcaaaaccttccgttaccgggatggttttttccgccgtcatcagcttgaggcggtcaaaccggtcagttttacactgcaacccggccagacacttgccattaccggcgcaaacggctccggcaaatccaccctcgcgcggatgttatccgggatgatcgaaccgagtggcggggaaatcctgatcgacaaacacaaactgacgtttggtgattacagctaccgcagccagcgcatccgcatgatattccaggattcggccacctcgcttaatccgcgccagcgcacggggcaaatccttgagctgccgctgatgctcaatacagatctcgatgctgccgggcgacgtctgcggattaacgcaacactgcgtcaggtgggtctgctgccggatcacgcggattactatcctcacatgctggcttccggacagaaacagcgtgtggccctcgcccgcgccctgattctgcagccggaagtgattgtggcggatgaagcgctcgcctctctggatatgtcattacgttcacagatcataaatctgatccttgaactccaggaaacgcaaaaaattgcctatatttatgtcacacagcatctgggcatggcaaaacatgtcagtgaccagatactggtgatgcacaacggtgaagttgtcgagcgcggtaacactgccgaggtactggcatccccgctgcacgatgtcacacgccgccttatcaccagccactttggtgaagcactgtccgccgaagcctggcgccaggatgtggattaactgccggtattctgataattcaggccggttacatctcaatttccggtaacctgttaacatcagccggatttttactaaacgtgtcacctgccgggttgcggcgcagaaggtgacagagaaaacacaaggaaactgctatgggttttatgaccggtaaacgcatcctgatcacaggggttgcaagcaaattatcgattgcttacggtattgccaaagcaatgcgtgaccagggggcggaacttgcattcacctaccagaatgacaagctgaaaccccgtgttgaagagttcgctcagtctctgggttcctacatcgttctgccttgcgatgtggcagaagatgaaagtattgaaaatctgttcacggaattagccaaagtctggccgaaatttgacggttttgttcactctatcggctttgccccggctgaccaactggacggcgactatgtggatgcggtaaaccgtgaaggcttccgtattgctcacgacatcagcgcgtacagttttgtggcgatggcaaaagcctgccgcagtatgctgaacccgaattccgccctgctgaccctctcttacctgggcgcggagcgcgctatcccgaactacaataccatgggtcttgctaaagcctctctcgaagcgaacgtccgttatatggcgaacgcgatggggaaagaaaccatccgtgttaatgcggtttctgccggtcctatccgtacactggcagcatccggtattaaagatttccgcaaaatgctgtcgcactgtgaagcagtcaccccgctgcgccgtacagtcaccacagaagatgtgggtaacgcggcagcgttcctctgctctgatctggccggcggtattaccggtgaaatcctgcatgttgacggcggtttcagtatcgcggcaatgaatgagctggaactgaagtaatcctgcttctgtccggctttccattaatatcaccgccggacaggtcaatcagctgacagcaggcaagcggacgaaaagcatgcgcgtcatggatgacgcgcctgagcgcacagggaggtgtttacagcgtcttttcgttttgcctgctgtcagctgttccccgcactttcagagagcacttcttttaattaccggcctgtcagcaatttctccgtcagccgctgcgcataaagcgcctcttcgccgctgaccagcggttgtgtctgattggcaacagattcgataaaatgccgcaccgcaccgtcaaatccgcgctgaaccagtaccggatcccacgctttcgggtgctgttcctgtatcccggcggcagtttcactgcgccagtgattcatatccgtcacctgataacagccgtcacgtccggtcacactgacctgctcccgctgactcgccgcacagcggtgcatagaggctgtcagccaggtgccgttatctgtctgtaaatggtgttccgcatacagcaactgattggcctcattcacctgcatatgaccacttttcagcaccacattcccatcccgtcccagccagagcagggtatccgcgatatgcagataatcatcggtcaccgtgaaagccacatcatgcggcccgacactgttgctgcggtgtttgtccatacggatcgatgccgcttttccggcaatctgttctctgagctgcagataaaacggtgaaaagcgccggttgaacccgaccatcagtgcccgctgttttttctccgccagactgacgagggcttctgattgttcatacgatgctgccagaggtttatcaacatacacatggcaccccgcattcagtaattcgctgaccacctgaaaatggctctctgtactgctgtgaacaaacacggcatcacattgttccgccagcgcactgagtgacggaaacagaggaaagcggtacacatcacagacctgacgtgccttttcctggttcggcgagaacccgccggacagcacccagttatccgttctggtcagaaccggcaaatacgctttttgtgctatcccgcccagcccggcgatcccgatacggatttttttcatgtgtgctctaccttttagtgttttgtaacaatgaattacaaagtcttcccataaattgaatctgtggcgattatatggaaagatggcgttaaccgacaaataattcgcattctgaatacatcccgcccgcgaataccggtctatacttcatcactactgccatgtccgttcttttgttttaactgaggagcataccatgcaattgttctataccccgggaagttgtgcactgtcaccccatattattttgcgtgaaaccggcctggatttttccctggtccgtgtcgatctgaaagcaaaaaaaaccgaaaacggtgatgattacctgaaaattaatccgaaaggacaagtccccgcactgagtatctgtgacagccagctgctgaccgaaggtgtggcgattgtgcagtatcttgctgatcagaaaccggatcgcaagcttattgccccggcgggaacgatggaacgttatcatcagattgaatggcttaactatattgccagcgaagtgcataaaagctacggcccgctgttctctccggaaaccccggaagattaccggccaattgcactgcgcaatctgatgaataagtttgcctatgtggacggcgtgctggcgaaaagcccgtatattaccggcaacagttttaccgtagcggatgcttatctgtttactgtctgcggctgggctccgcatctgaagatttcacttgagccgtatccgcatttacaggcgtatctggcgaaaattgcccatcgtccgcatgtgcaggatgcgatggaagcggaaggtctgatttaatctttctgatacgcagaaacaaaaaaacgccggattatctgtccggcgttttctttatgctgatgcgatgttcagaccggttcagtcgatctgttcagcgcagaatttgtgtgtcggaagcaccatttcatcctgagccgcaaccagttgcagttcgtactcattcatggttttggttttcagcattacttcatacacagcagcagctacatgttccagtgctttcggcagttcttcgcctttcagcagattcaccagcatcagaccactggttaaatcgcccacacccaccggctgacgttcaccgaagtccaccagcggacggctgacatgccaggcgtgctcagcagtgaccagaatcatttcgaagcggtcagcacggtaaccagcgcgggacaggtgtttgaccagtaccagacgcggcccttttttgcacagttcacgggcagcggcaacggcttcatccacattatgaatggtttgtccgctcagggtttccagttccagcaggttcggggcgatcatatcgctgactgccagtgcttcctgacacaggaaatccgccactcccggcgccacgatacagcctttttccgggtgtcccatgaccgggtcacagaaataccatgcctgcggattgcgggttttgacttttttcaccacatccaggatacgcttgccctgctctgccgagccgaggtagccgctgagcaccgcatcacagcgggtcagctgatcgattttatcaatgccgtccacaatctccgtgatgtgctctgcgctcatcacgcagccggtccagccttgtgcatactgtgtgtgattagaaaactggacggtattcagcggccagacattaacgcccatgcggcgcatcgggaattcagccgcactgttaccggcgtgaccatacacaacatgggactggatagagagaatatttttcattgatacaacctgattttttattattactgtgcatatcatattctgtgaaacagaaaagatcctgctgacagatcaaaaagggcaaccttcgttgcccttgattaccgtaaactattatttccagcagatcagacagtaatgttttttgccccggcgcagcagagtgtaacgtccgaacagcttgtcgctgtcagtgaagcggtattccgcatcagactgtttttcgccgttgagagacaccgcattggagccgatcatggtacgggcctgaccgcgtgacggaaccagttccgcaaccaccagcgcctgctgtaaatccgcatcgctgtccagttcgatatgcggcataccatcctgcgccagctgcgcgaagtcatcttcagtcaggcttgatacatcgccgttgaacaggctgtcagtgatacgacgggcagccgtcagcccagcttcgccgtgaaccagttttgtcacctgctctgccagaacgtactgggcacgcggtgctttgccgctggctttgtcttccgcttccagtgcatcgatatcttcgaggctcataaaggtgaagaatttaaggaaacgatagacgtccgcatccgcagtgttgatccagaactggtagaatttgtacggactggttttcttcggatccagccataccgcgccgccttcagttttaccgaatttggtaccatcagatttggtgatcagcggaacggtcagaccccaggcctgctgctggttcagacgacgggttaaatcgataccggaggtaatgttaccccactggtcagaaccgccgatttgcagctcaacgccgtgatctttattcagacgggcgaagtcataaccctgcaacaggttgtaagagaattcggtgaatgaaataccgacatcatcgcggttcaggcgctgcttaaccgcttccttgttgatcatctggttcacagagaagtgtttaccgatatcacgcaggaaggtcagcacatccatcgagccgaaccagtcatagttgtttgccgcgatagcactgttcgcgccgcagtcaaaatcgaggaacggggaaacctgctgacggattttatccacccagccgtgaaccgtatcctgtgtattcagtttgcgctccgttgctttaaagctcgggtcgccaatcagccccgtggccccaccgaccagtgccaccggacggtgcccggctaactggaaacgctttaagcacagcaacggaaccaggtggcccaaatgcaagctgtcagcggtcggatcgaaaccgcaatagagggagatcgggccctgcgccagtctctctgctaacgctttttcatccgtaacctgggcaatgaggccccgctcttgcagttgttttatcaggttcgtaccagacatcaatgactccgtcagttctgttttgtctatgcaaaaatagtggattggaaatatgaaggctatagcataaagcggcactccgtgaagtgccagcaattaaaatgattttactgaagaaattctgacaacagccggttacggcgcgaggcggtcaatatcccagccgtctgcggtacgggtgtacaggaagcggtcatgcagacggtgttcaccgccctgccagaactcaacagaactgaatttaatccggaaaccgccccagaagctcggcagcggaacatcaccctgcttaaatttctgtttcagctcaagaaatttgccttccagaataccgcgtgcggaaatccgtgaggattgctgagatgcccatgcggcaatctggctgtctttcggccggctgtggaaatattttactacttccagtgtggataagcgctccacctcgccgaggaaacagacttgtctgtccaggctgtaccacgggaaatgcacactgattttcggattttttgccagatgctgcgccttgcggctgcccatattggtgtagaaaatcagcccgtctttatcaaagtgcttgagcagcacaatacgctgatacggctggccggtttcatccacggtcgccacacacatcgcagtcgggtcggtcagttttgcctcacacgcctgtttaagccagcgttcgaacatttccagcgggtcgtcgctgagatcacggcggcgcaacccccctttggtgtattcacgtcgcagatccgcaacgtcagtaaactcatctgacatgccttttatcctcttatcttatctttttaataactgaaactgtgttgtcttttgttacggcagccggcggataacaggatataccgcacccaatacggtttcccggtctgcgccggtgacagacggcagattaccgggttcaccggccagtgtccgcgccgccagccaggcaaatgccagagcttccatatcatcgccgctcaggccgtatttatcagtcgggctcacttcagtgcccggcaactgtgcggataactgcgccataatctgcggattgcgcgcaccaccgccgcataccagcaggcgctcacagccgccgcacagcgtaacctgctcactgatactgacagtggtcagcgccagcagggttgcctgcacatcctccggtttcaggccggggaaattatccagttgtgtggtcagccactgcatattgaaatattcacgcccggtacttttcggtgccggacggcggaaatagggatcactcagcatctgtgccagtaagtcctgattaacgtgcccgcttttcgcccattcaccgtctttatcatacggctcggcacggtgccgccatgtccagctgtccatcagcatattgcccggtccggtgtcataccctctgacctccgcccccggaatcagtgtggtgatattagcgatcccgccgatattcaggataatccgtttttcatccgccacaccgagcaccgcctgatgaaaggcaggtaccagcggcgcgccctgcccgccgtaagccatatcacggcggcggaaatccccgacagtcatgatattggtcagcgcggcaaccctgttgttatccccgagctgcatggtaaaaggtgtttcgctgtccggctcatgccagacggtctgtccgtgacagccgatgccggcaatatcctgcggattcagccgggtttgtgccagcagcccgccgacagcgtcagcaaacagtgtgcccagttcataatccagacggccgatttctgacagcgtcgtctgctgtccctgacataccgccagtatgcgctttttcagcgcgtgcggaaacggatgcgaatacgccgcctgctgcgccaccactgaatcattaatcgcagccagaacaacatccaccccgtcaaggctggttcctgacatcacgccgatataacgtcccgaacgcataacctgttccttttaatcaataaccgtctgataaaaatatagtattcatattccgtgtgactactataatcagggcgctccgcagattcaccccttttcgtaccgtgaccccacttaatcctcattctgatgcacgcttcacatttgtgaaataagaggatttaccttgccgccggaacgtttcgctttaagctgttcctaatgaagatgaaaataaaacgtttttaatgctaaattattctgcgataatagataagatattacactacagataatgaacacatctgaatctgtgaatacaataatcaggagttaagtatgtataagcgttttctcgtcggtgtatttgccgtcgtggccctttccggttgtgtgaatatggacacactgagtggtgacacttatagtgcagaccaggcgaaacgtgttcagaccgttacctatggtacagtgatgagcgcccgtccggtaactatccagggcggcagtgacgaaaatatcctcggtgcggccggtggtgcaattctgggtggtattttaggcagcactgtcggcggcggcaccggtcagaccctggctaccgcagcaggtgcaattgctggtggtgttgcaggccagaacgttcaggcagcaatgaacaacacttccggtgttgagctggaactgaaacaggataacggcgaaatcattgttgttgtacagaaacaaggtaaaaccccgttctccgtcggtcagcgtgtccgtatcgcgaaatccggttcaacctataccgtatctccgcgttaattttcacggtttaccggcaaaaggcgaaacaactgtttcgccttttttattacctgccgtcagttacggttgtgcaactgtacgatattattgtccagttttctgacaatctccgccagcgtatataattcatcctgcgtgatcccgcccagaatttcacgccgtgttttttcaattaccgcgtccacctcacgaataaaaggttctgattcctccgtcagtttaatccgtttcgctctgcggtcattaatacagatatgtcgtgtgattaaccgcttttcttccagctgatccagcgtgcggaccagcgacggctgttcaataccaatcgcttttgccagctgaatctgagactgatccggcggcagcaggctgatattgtagagtgtaatccagtgtgtctgtgtgagtttcagtggtttgagccggtggtcaatcagtgatcgccaaatccgcactaacctcgctaagtctgatcccaatgttaactccacaaatttctccttatgtgaatacggtacggacgcatatacacgccatcatgtctttcaatcacccgaaaaaagaagcgcagcgctgcggtgtttattaacagcggacgcaatattgctgtgtgacaaaaacagttcatgcttatgtcatagtcaatttaataggcacgaaataattagctttttatacaaatttaattgattaagctgatgaacttgtttcacattaagaatagcgatcatcactgaacggatctatatttttttacataaccaccattttatttttaacaaaaaataattgatatatgatattttcaatattaaacagtgagttaatgaaacatcatcgccatgatggataaggcggtaattttatatttaatttatataatttcattcttgattataaataaagatgaacttaaaaatattatttatctgcaacataaatcctttgtgctaaataacatccatacattaattcatgtctaatatatagatttataattatttatttaaaataaatccagctgtccggatggcgcttccggtggtgagtccccttttgcggctctgtaacgacgctgacggcacagccgaatcacattttctttttgtgcgttactcagtgacagccactgaaaacgctcatcacggctccggtagcatccccggcagtagcctttttcattcatctgacatattcccacacaaggtgaagggatatcaaaaaagtgaagttgttctgccatcggctgatgtccttttgtctgatgccctgccggacaggtaatggttatcctgtaaccatcagcatcctgataatttgaattgtagtcaattatcacgttatagtgtgagccattactgataaataactgaaagcactctgagaggttactttatgcgtgtactccataccatgctccgcgtgggtgatatgcaacgttctgtcgatttttacactaaggttctcggcatgcgtttactgcgcaccagtgaaaacccggaatataaatattctctggctttcgtgggttatagtgacgaaagtgaaggctctgttatcgaattgacgtataactggggcacggattcctatgagatgggaacggcattcggccatatcgcactcggcgtggatgatgtcgcggcgacctgtgatgctatccgcaaggcgggcgggaatgtgacccgtgaagccggtccggttaagggcggtaccactattatcgcgtttgtggaagacccggacggctataagattgaattaattgaaaataaaagtgccggggctgctctcggtaactgagtgactccgtaagaaggatcagaacgatccttcttttccggctcagccctttctccctccggcaagccgcgctagaatagtgcgttttgtttgtttaattaagagtcccatgtctgaaaatcaaaatcacaatactctgagcgcacgtttccgcggctattatcctgtcgttattgatgttgaaaccggcggttttaatgccagaacggacgggatgctggaaattgccgccattaccgtcaaaatggataacaacggctggctgatgccggatcagcggcttgaatttaatgtgcagccttttgagggtgcaaaccttgatcccgccgctctggcatttaccggtattaatccggccgacccggagcgtaatgcggtaacagaatatgaagcgctgcatgccattttcaaaatggtccgcaaaggcatgaaagatgcggattgcaagcgggcgattatcgtggcgcacaatgcaaattttgatcacagctttgtgatggcagcggcagaacgctgcggactgaaacgcaatccgtttcatccgtttgccacctttgataccgccgcattaagcggactgtctctgggccagaccattctggcaaaagcctgtatcaccgcaggtatcccgtttgacagcaaaaaagcccacggtgcggcttatgataccgaccgtacctccctgctcttttgtgacatcgtcaaccgctggaagaaactgggcggctggccgccggcggcagacagtaatcagtgagaaaacgccaccgtcagggtggcgtttttcgctatattgtcattaatgcgggcaatatatccgctgattaaagtttcatcagttccggcagaattttcccgctaatttcggatatcacctgaccaacgctttcacggaatatcgcttcaaatcccggtctggcaagatactcttttgctttgcccaaatcagcgatactgccaagctgagagaattcctcctgagccacttcctttctcagcagatttcccgattcttcacggataccttcagaacccggttcatatattttcccgtttatggagctgagctgggtaataatccccctcagcggaccacctgagatactcaccagcatgtccggttgcagaggttcgttattctcaagtttacctgccagtatatccagatgctttggcagacattcttttgctgactcaagtaaaatctgagaaaacaacggaatctgcacaggcgggggcggcgtttccgctcgtatttccgttttttcgcaacagaaagagatattttttatccggtcacctaactgatgcagtgagttattcactttcccttttgctgacataaaaaaatctgccacgctgttgcaaatgccgctgaatcgctcagccagcccggggactcttgctgccgtatcttcagtcagtgtaccaagcgcaggtcccggcccgctgtatgaaatatacccggttaaaataacattttgtcctgctgatgttggctgcattttttttcctttctgtgtaattaacgcccccactctagaaaataaccgcccggacaactttcatttcaccgccatcagaaaagcaaaagccccgcagcggtgacactgcagggcttttctaaacagtacgggacgtgattattcttcgttttcagtccggtattttgctgcggtttctttaatcagtggctgtaattcaccgcgctggaacatttccataatgatatcacagccgccgaccagctcaccgtcaacccacagttgcgggaacgtcggccagttagcgtattttggtaattcagcacggatatccggattctgcagaatatccacataagcaaaacgctcttcacaggcagccagcgcctgcacagcctgcgcggaaaaaccgcagctcggcagcttcggagagcccttcatatacagcagaatcgggttttctttaatctggcgttcgattttttcaatagtcgtcgtcatgtaaaacgtccttcacttcagatcggttagtaccggtgttaacttacccgcagaataccacttttcactgcaaagcgatattggttttaacatactgttaaaatcgggcagagagatcaatccggtgtattttcagctgaaaacacccccggtcaaaaccgatcattacatctgttagttacggtattttcctctgataaacaagacctccgtcattttttatcttacgcaatgatgccataatccgcactttatatcctgttaacaatctgatgagctgaaaatgacctttgagtggtggtttgcctatctgatgacatccgtaattgtcagtctgtctcccggcgcaggtgccattaacagcatgacgacgtccgtcaatcacggctaccggggcgcgattgcggccattgccgggttgcagaccggcctgatgatgctgattatcctggtcggtgtcgggctggggacattgttgtcacaatcggttcttgcttttgaaatactgaaatgggccggggcggcctatcttatctggctggggatccgccagtggcgggcagcgggaactattgagctgagtgcacaggcggcaacgctgtcacacaaaaagctgtataagaatggcgtactggtgaatatctcgaaccccaaaagcattgtttttctcgcagcactgtttccgcagtttattatgccgcaccagcctcagctgatgcagtatctgattctgggtgtcaccaccgttgccgctgatattattgtcatgacagggtatgccgtactggcacggcaaatcgcggtgtttatcaaaagcccggcacagacccgcgccatgaataaagtgttcggatcattatttatgctggtcggtgccctgctggcctttacccgtccggcatgagataaacatatataaataacgccccgcatcattatggggcgttataactataaagctaatatcttaatcaaaaacattattaataattgatgtgacaattgcggtactcaccgcaataagtactaaatcgttaccggcgatacgccattcataccccggataatgcggtaattgctcaagcatagaggcaggaaccgctttctttgcaatacccggcggcagtggttttcctctgaccagatttttggctattcccggcggcaacgcactgtatccggtcaatccgcttcccagtgcaattctccgcgcatctccgtaagtcagtgtcagcgatatcccgttgccggaatccgcaaactccctgctctcttttccgttgcctttatgtccttgttttttggactgtccgtgaggattgccatgccctttgccgtttcccgggtcagcataagatgaaagcggcaccgctaaaagtccggtgataaccaatacagcattgcatacctgtgtaaatctgcgcataacacaacctctgcgtattaatactaatggtaagcgttgatcattccgcaaaattacgcaataggataaccggacaacatgattcgccactgtactgaaaattggttatcatccccttccgctttttacccggataacccgatgtctgacattaccgatacctttatcgccccgccgtgcccggagcagattgacattctttatcaggatgagcacctgctgctgattaacaaacctgcagggctgctcagtctgtcgggaaagaatccgcagaatctggattccgtgcattaccggctggtacagctgtttcccggctgcacactggtacaccggctggatttcggcacatccgggctgctgctggtagcccgtaacaaagccattaatgccgcgctttgccgtcagttcagtgaacggactgtggagaaaggctacagtgccctgctgtgcgggcatctgaatgagaatgaaggaataattgatgcggcgattaccaaagatccggcgttgtttccgcgcatgacgatatgtgctgtccgggggaaaccggcccgttcacattatcaggtgactgagcgcttttattatgaaactgaggacgggctctctctgccggtcaccagggtggcactgacaccggaaaccggccgcacgcatcagctccgcattcattgtcagtatctgggccatccgattttagggtgtgatctctatggcgggaaactattgccgggcaccggaaatattccgcggctgatgctgcacgccggggaactggattttgtgcatccggtcagcggcgaaccggttaatgcccgcagtccctgtccgttctgaacagggaagcaggcagatgcggatcaccacatcaaatcatccgggattttaaaatcagcatacggatcgtcttcatccgcttcgtcctgcgccagcgcattatttaacacaatgctttccgcatcacgctgtgtgattttatctgcaacaaccgccgggataatggcatattcactcacactgctgttttccgtgcttaaccgggctatcgccagacggccgctgatcagctgagactgtgtggttttgtccacggcaatgcttttaatcacgttgttgtcggtgaaattaaaatcaatgctgccttttgaaataatgatccggttcatttcaatcagctgcttcacctgagctttatattctctggataaaacagcctgtttttgctgctcactcagctgtttatcacgctcaagctgcgcttttttattctcttccaccgcttctctggcctcacgggcctgaacgcgtgatttttttgctgttctgcggactttatccatttttttgctggtcaccagtccggctttcagcatctgctcttgtaatgtgagttttgtcattgtcttttctgaatcagtttaatattgcaggtaattataccggtaattttcaggattgtatccggcacgtcaggccagctgcattttcagccagtaaccctgctggcacagactgaaaaattctttgtgccgcggagaaattgttttcgctttatcccccgtgaccgtccagacaatccactgttccgggcactgttcgtcaccggtctgcacggtagtttctatctcttcactgcacatcagctcaataccatcgcggaactgccatttgcggacacgccggatcacttcagagagctcatctttctgataatggtcacaaataacattgcaatcagtatggttttgtatcgcgcgggaaatatagtctgccagcatcgtgatcattcttgtacttttgtcatagcggagattgtaaagggtctgcggccggttgacaaacggcggtcgttgtcacgctttctgtaaaattgttaaatttgcgcggatttcagccggtaaacccgttatatttaagattccgcagtcatacggggaagacagaatgaaacgctattataactggatctgccgccataagctgtacaccctgcttatcgcctttattatcacggatatcattctgtgggcgattttgtctttcaccatgtgaataacaccccccccggtatttcacgctgttttttatgacaaaacttgttaagataattcgcagaataataacagtaacccgtctgtgatgaggttactgatttaaccttaacaaggagaatgcaatgtcgtttgaattacctgcactgccttatgcaaaaaatgcattagcgccctatatttctgaagaaacactggaataccactacggcaaacaccacaacacctatgtggttaatctgaataacctgatcaaaggcaccgcatttgaaggtaaatcactggaagagattatcaaaacctctgatgccggtatcttcaataacgctgctcaggtctggaaccacacgttctactggcactgcctggcaccaaatgccggtggcgaaccaaccggtaaaattgctgacgtgattaacaaagcgttcggttcatttgccgaattcaaacagcagtttaccgattccgcagtgaaaaacttcggttccggctggacatggctggtgaaaaaagcagacggcagcctggctatcgtcaatacctctaacgcggcaaccccggtcagcggtaacgacaaaccaatcttaaccgttgatgtctgggaacacgcttattatatcgactaccgtaatgcccgtcctaaatacctggaaaacttctgggcattagtgaactggaaatttgcggaagaaaacctggcgtaatccggaaacacattatccggtaacacaatacagttgatcaaaaaagggcggaattttccgcccttttgtactgtaaggggtgaatcagaaaagcattgttgcaaataatacgatcataaccagtgctgcaaccgcggttgacaaaccatatttcagatctgtatccattcttatctccaaaatagctgcttagtgacctgatgatgattacctgacatcctgaatcatcaaattaattaaaacggatggtctgaccggaaaacccgaatagctgaccatatcaataaccatagcacaggtaatattttttacttttgacccggatcagacaacaatgcctgtttttacagaaatttttctattgttaccgcataatggcactataatagcaatcgattaaccgaataataaaatacagaccggcaggtcaggagttgttttcatcatggcaacgattaaagatgtggctaagcgctcgggcgtctccaccacaaccgtctcccatgtcattaataatacccgtttcgttgcggaagaaacgaaggcggctgtctgggctgctatcaaagaactgcactattcaccgagcgccgtggcgcgcagtctgaaagtcaataacaccaagtccatcgggctgctggccacctccagtgaagcgccgtattttgcggaagtgattgaggcggtggaaaacagctgctacagcaaagggtataccctggtgctgtgcaactctcacaataatcctgacaaacagaaagcctacctggcgatgctggcacagaaacgtgtcgatggtctgctggtgatgtgttcagagtacccggatcagctgattgccatgctggaaggctaccgcaatatcccgatggttgtgatggactggggcaaagcgcgcggggatttcaccgatgcgatcattgataacgccctgcacggcggttatctcgccggccgttatctgattgaacgcggacaccgtgatatcgcggttattccggggccgcttgagcggaacaccggcggcaaccgtctggaaggattccgcaaagccatgaaagaagcaggtattacggtgcgcgatgaatggattgtccagggcgattttgaaccggattccggttatcaggccatgacacagattttatccggcaaacagcgcccgacagcggtattctgcggcggtgatgctatggcgatgggcgcaatttgcgcggctgatgaaatgggtctgcgcgtgccgcaggatatttctgtgatcgggtatgacaatatccgtaacgcccgttactttacccctgccctgaccaccatccaccagccgaaagagcggctgggacaaatggcactgaccatgctgctcgaccgcatcgtcaacaaacgcgaagatgcgcagaccattgaggtgcatccgcgcctggtggaacgccgctctgtagcggatggtccgtttatcgattaccgccgctgaggatcagcgcagccattcggcattgagcgtgttgctgtccccgagataatcgagcagccagctcagtgccggagaggtgtctttatccacccaggtgatacagcacgggctgtccggcaatggctgctctatcttcagtgctgccagccgccccgctttaatcagcggatcggcgcggtgcgccggcatcattgccacacataatcccgattccacacaggcaatcccgcgatcccagtccggcaccaccaggcggcgctgattatccagtgcccacgtatcgcgtttcggcagagaacgtgaggtatcttccagacacaaactcgggtacggcaccatctcctcattggtcaggacatgaccggcagaggccagcggatgatccggactgaccaccgcacgccacggcataaagcccatatcgcggaaattatagcgctcgccgataggggatgcgcgtgtcgcaccgattgccacatccacccgtctgtccaccagcgcatcccacaccccgttaaacacttccggataaatatacaactcgatatccgggaaatgatgataaaaatccagcagaagtcgcgttatccgttccggttttacgatacagtcaacggcgatgctgaattgtccgcgccagccgttggcaatcatctggcactggtgacgtgtggatttcatttttttgatgacatcacgcgcttctttgacaaacaacgccccggcaggtgtcagttcaacatcgcggtgacgccgttcaaacagcggaaccgccagccactcttccagctggcggacactgtagctgatggcagaaggcacccggtgcagttcctctgccgccgcactgaaactgcctgtccgcgccacagcatccaccacatccagcgtatattctgaccacataatccttcctttcaaaaaatttcacagcagtgtgcaaataataacgttttacaagggaaaactcgaatagttaaaatactaactcacgcattacacttatttaacattcaggtatttctctgtgactgtcaataaatcgccttcccgcggctttctcttttatctcgccggactcagcatgctgggttatctcgcgattgatatgtatctgcctgcattcggtatgatgcaggactctctgaactccacagccagcgcaatcagcgccagtctgagtatcttcctggtcggttttgccatcggtcagctgttatggggaccgctctccgataaaatcggccgtaagccggttctgctgatgggcctgagcctgtttgccctgagctgtctggccatggtctgggtttccacccctgcccagttattattactgcgttttgtacaggccgtcagtgtctgctctgccgctgtcacctggcaggcgctggttatcgaccgttatgacgatcaccgcgcacagcgtgttttcgccgcaattatgccgctggtggcactctctccggcactggcaccgttactgggcgcatggctgctcaaccacggcggctggcatgaaattttcctcgtgctcggcggtatcaccctgctggtgctgatcccgaccctgatgctgaaagaaaagcatcatatcgcgccggatgcggtcaaaacggaaaaacagaaaatttccttcttccgtctgctgaaatccccggtttacagcggtaacgtgctgatttatgccgcgtgcagcgccggtttctttgcctggctgaccggttcgccgtttattctgcgcgatatgggttataacccgaatgatatcggtctgagctacattccgcagactatcgcctttatggtcgggggctacggctgccgtgccctgttgtcgcggattaacggcaaaacattattaccgttcctgctggccggttacgccgtcagtatggtgggcttgtatgctatggcaaaattcggtaacccgtcactggtggcgatcctgatcccgttctgctttatggcagcaatgaatggcgcgtcttacccgattgcggtatcaaacgccctggcggtttacccggaacacagcggtaaagcagcagcattacagaatgccattcagctcggtttatgctccgcgatcagtttcctcgtttctgccctgatgcatgagccactgctctccaccacagcagtgatggcggcaacggtgatactgaccatcggcggttatattatccagcgccgcccttcgcgcacctccgtgactattgcggaacaaaatcaatagattgcacctcctattaagaatattcctaattacaggccgtactcaggtacggccttttttgtcattgaattttaatttcaggctcctatacttttctgacaattcgttttaaatccggattttgagctttgtttttgttttaacgatcacgttaatacgcagactgtcacccgatgacggccaattacaccggttctgttgttcccgcgcaaaacgtcataaataaagcactcagaatcccgctttgataaaaattggagataatatgagttctgattgtgtcgaaaatcaaaaaacgcctgccgactcctggcagcggattgcctccgatcttttagacgaagccggcattgagattaatggttcccgccctttcgatattcaggtgcataaccagcagttctttaaacgggtcttgcagcagggctctatgggactgggtgaaagctatatggatggctggtgggactgtgagcggttagatattttctttcagcgggtgttacgcgccgggctggaaaataaactgccgcagaatatcaacgatattataaaaatcgccatggctcgtctgcgtaatctgcaaaccaaaaaacgggcgcggattgtcggcgaagaacattatgatctgggtaatgacctgtttgagctgatgctcgacccgtatatgcagtattcctgcggctactggaaaggtctcagtgatgaccccgccaatctggcgaaggcgcaggaacagaaactgcatctcatctgtgaaaaattacagctgaaaccgggtatgcaactgctggatatcggctgcggctggggcggactggcggcgtatgctgcgaaacatttcggtgtgtcggtgaccggtgtgaccatttccgctgagcagcaaaaatatgctcaggcgcgttgtaaggatcttgacgtaaatattatcctggaagattaccgcgatttgcatgagcaatatgaccggattgtgtctgtcgggatgtttgagcacgtcgggccgaaaaattacgccacctattttgatgtggtcaaacgtaatctgaaaccggacggtttatttttactgcacaccatcggttcaaaccgcaataaagtgaatgtggatgcctggatcggaaaatatattttcccgaacggttgtctgccgtctgtgcagaatatcggcgacagcagtgaaaataaattagtaatggaagactggcataatttcggggctgattatgaccggacactaatggcatggcattcccgttttcaggcagcctggccgtcactggaaaataattacacaccgcgctttaagcggatgttcacctattatctcaacgcctgtgccggtgcattccgtgcccgtgatatccagctatggcagatattatggagcccgcagggttgtgagggcggattacgcgttccgcgctgaatatcatatccgcaataaactatccgcaataaaaaatccggtctgacaaaaatcagtaccggatttttttatctcaataaagtcaggcctgtggtttttccattggcaccggcggcgtcaggctttcctgcaactgctgcattttctgcgccagcacccgctcggtggtatcaacaatggcctgtgtctgcggatccagctcaatattcactttatcgcccagccgttttttacccagcgtggtgcgctcacgggtttccggaatcagatgcacacagaaacggttattcaccacatccccgatagtcaggctgataccatcaataccgacaaagcctttatgcaggatatatttcatcagggctttatcttcgatgcgcagccagatctgataattattttcagagacaaagattttggcaatttccgccgtggtgacaatatgaccggacataatatgcccgccgatttcatcaccgtatttagcggctctttccagattgaccacatctccggttttaatgctgccgagattggttagtcttaaggtttccttaaccagatcaaaactgattaaatccccgtctatttttgtgactgtcaggcaacagccgttatgtgccactgatgcgcccgtttctatcccggccagcatatcaggcgggaatttcacagtgtgagtacgaaagttttctttttcttcgatggcgacgacggggcctttgccttgtacaatcccggtaaacatgcggatctccagtcagtattcggatagatttatgcagtttatcctgaaacagagaattaaacagcccttcccgttacatcccgcacatttaattgtattggcttgtatttgattaatcgctagaatgatttttccgcctgatccggtaaatgtgttacgaatcccggaaagtctttcctcctccttttatcagaataaataaggtgtattacgtgcagaagtatttgaaagaagcgcgtactttgctggctcttggtattcccgttattatcgcgcagtttacacagacagcgatgggcgtggttgacactgtgatggccggcagagtcagtgcgacagatatgtccgccgtggctgtcggtacctccatctggctgcccgctatcctgttcggccacggtctgctgatggcgctgaccccggtggtcgcgcagctcaacggctccggccgccgtccgctgattgccaatcagatccgccagggtatgtggctggcggcatttttatccgtcctggtcatcgcggtgctctataacagccgctacattattgaaaatatgccgcatattgacccggtcctggctgaaaaagccgtcggattcacccacgctattatgtggggggcaccgggttacctgttttatcaggtgctgcgcagccagtgtgaaggactgtcgaaaaccaaaccggggatggtaattggttttctcggcctgctggtgaatatcccggtcaactatatctttatttacgggaaattcggcgcgcctgctctcggcggtgtcgggtgtggtgtcgcgaccgcttccgtattctgggcaatgttcctgtttatgcgctggtatgtgaaacatgcccgttcgcagcgtgatgtgcagccgaagagccgctttaccccgccggactgggcggtaatgaaacggatcacgcagctcggtctcccaatcgctctggcgctgttctttgaggtcacgctgtttgccattgttgccctgctggttgcgccactaggtgtgacggcggtggccggacatcagattgccctgaacttcagctcgctgatgtttatgttcccgatttcactggggatcgccaccactatccgtatcggctttaacctcggaaaaagttccacggagaaagcgcgtgtatccgcctataccgggctgggtgtcgggctgatgatcgcggcggtgacggcgctctttactgtgctgttccgtgaacctatcgcgctgctgtataacgacaatccggaagtagtgattatggcctccggcctgatgctgtttgccggtatttatcagctgtcggattccgttcaggtaatcggtgccggtgtgctgcgcggttataaagacacgcgcgccatcttctatgtcacctttacggcttactggatcctcggcctgccgtccggttatattctcggactgacagatctggtggtaccggcgatgggccctgccgggttctggatcggttttatcatcggattaaccgccgcagccatcggtatggcatgccggatcctgtggttacagaaacagccggacagttttatcctgcaacgcgccggtcgttaacggctttttgacgggggaaatgcacagttttcagtccgatagcattaaatacgagcagtcggacaagaaaatgtgtttttccccttgcaagagtcggttcggatcgttaatattcgtccccgttgtcagcgaagatattaaagaatgcgtccatagctcagttggttagagcaccaccttgacatggtgggggtcggtggttcgagtccacttggacgcaccatttacttcgcaaagcaattttcacacagtgcgtccatagctcagttggttagagcaccaccttgacatggtgggggtcggtggttcgagtccacttggacgcaccatttctcagcagttccgttttacctcccttttcagttcatccgattttcagtcagttaccctcttctgttttcattgtacttctgcgtatcaatacagctgttttcttgcgttaccgcaagaatgttaatttatttctgattttatgattcaaatcacactaataaccctctataatgcctgcgtagttgttgaatggattcagcttgctgatttacaagcactgaaacagagaggcgtgataaaaaacacgctatactgaatctgtttttttacaaaaacgactaattttaataaccggggatcacgacaattgcctgttcttactcatgcggtgtgaatacaggcggttgttcactatttactctcaataactgtagatgggctgtcatgaaaaagaccaaaattgtttgtactatcggacctaaaaccgaatcagaagagaaactcgaagcactgttagatgccggcatgaatgttatgcgtctgaacttctcccacggcgattacgaagaacatggtcagcgcatcaaaaatctgcgtgctgtctgtgcgcgtaccggtaagaaagcagccattttactggataccaaaggccctgaaatccgtaccattaaactggaaggcggcaatgatgtcgcgctggtggcgggtcagacctttacctttaccacggataaatctgtcatcggtaacaatgagcgtgttgccgtcacttatgcgggcttcgcgcaggatctgaaaccgggcaatatcgttctggtcgatgacggtctgatcggcatgcgtgtcaaagaaaccaccgcaacagaggttatctgtgaagttctgaataacggtgacctcggtgaaaacaaaggggttaacctgccgaatgtgtctatcggcctcccggctctggcagaaaaagacaaacaggatctgattttcggctgcgagcagaatgttgacttcgttgccgcctcctttatccgtaaacgtgccgatgtggacgaaatccgtgctcacctcaaagccaacggcggcgaacatatccagatcatctccaagattgaaaaccaggaagggatgaacaacttcgatgaaatcctcgaagcctctgacggtatcatggttgcccgtggtgacctgggtgtggaaattccggttgaagaagtgattttcgcgcagaaactgatgatcgaaaaatgtaatactgcacgtaaagtggtcattaccgcgactcagatgcttgactccatgatcaaaaacccgcgccctacccgtgcggaagccggtgacgttgccaacgccatcctcgacggtaccgatgcggttatgctgtccggtgaaagtgcgaaagggaaatatccggttgaagctgtcagcatcatggcaactatctgtgagcgtactgatcgcgtgatgcacagccgtctcggcgatttacaggccggtaaaaaactgcgtgtgactgaagcagtctgccgtggtgcggttgaaatgtcagaaaacctggatgccccgctgattgttgtggcaaccgccggtggtaaatccgcgaagtctgtccgtaaatacttcccgaaagccccgattctggcgctgaccaccaacgaaaccactgcccgtcagttactgctggtgaaaggtgtgaccaccaaactggtgaacgaaatcttatcaaccgatgatttctaccgtatcggccgcgaagccgcgctggaaagcggtctggccaccaacggtgaaatcgtggtgatggtatccggtgcgttagtaccaagcggcaccaccaatacctcatccgtacaattactgtaatatttttcagcattatctgaattaatgagagcacccgctgcacgggtgctttttttattctaaactgtaggggaacatgaaatgaagcaacgggccgcagaataattgccgctttctgaatacgggataataccgcactgctgtatctgtctccgcatcagattatttggttgagaattacgcaattgccgtttttttttgatttattttgcggtttcaggaaaataatctttgtaaacgctgaatttctattctctttccctattgaaatgtgtaatatcattactgctacttggtgattaactttaatctagagggtattaaaatgggtcgttctaagattgtattaggtgctgtagttttagcttctgcattattagcaggttgttcttctaacgctaaatttgaccaactggacaacgacgttaagacgctgaatgccaaagttgatcaactgagcaacgacgttaacgcaatccgcgctgatgttcagcaggctaaagacgaagcagcacgcgctaaccagcgcttagacaaccaggttcgttcttacaaaaaataatttgtaatcacgatctgaagaacaggtggcgtagcataaattatgttacgccatttttttatgcctgcgatttatgccgggcgtaaaaaaaccgcctcacaacggaagcggttttcatctgtcacagcgtaaaagcgatattactctgcgctgttttcctcacggacaatcggacccggctgggttaactgacccggtgcaaaatcggccggtttcaggttcagtgccttcacttccgcttcttcgtccatttccaccggtgcaaagttggttttctctgccggtgccgcttcctgcttatactccgcatcacggctgacattcaccggcataccggagcggcgggcaatcgcctgctcaacgatggcgctgttagtgtccggagactgaataaagctggtcagtccggcagaacgcgcaatcggcatagtctgcgggtcgtcatttttattacgggacagtggctgatgtacttccacatagcgctgaccatccggttcaacggcatatttcaccggctcattcacgatctgaacccgtgtacctttcggaatggttttaaacagtgcttcaatatcatgcggacgcagacggatacaaccggagctgacacgcataccgataccaaagtccgcattggtgccgtggatcaggtattcaccgcgaccgtgcgccagacgcagagcaaacagccccatcgggttttccggaccggccgggataactgccggtaacgtgatcccctgagccgcataggctttgcggatattcgcggttggtgtccaggtcggatctttgatcagctgggaaactgaggtggtcataaccggggtatcacgccccagctgaccgataccaatagggtagacccgtacggtattggtgccctgcgggtaatagaacagacgcagttccgccaggttaatcacaataccctgatgcggggtatccggcaggatcagttgtgacgggataatcagttcgctgccgggtttcggcagatacggatccgtccccgggttagcttccagcatcgccagcaggccgataccgtattcggcggcaatcgcttccagtgagcgtccgtcatccggcacaacataggtgacgttttcaccgatgacccggcccttatccgcagggagttgatattcggttgcccgggctgttaacgcagtaaccgctaacaacagcccgcccagcaacgggagaattcgtttcattccagatcctcagctgatggtataaaaaaatacgtggccgctttccggccacgccaggtaatatattattagcagagtaagtaaaagggaacgatgttttatctcatttgctgcgtgttttgtatgattgttctgaccatggcgttcagtccctgagtacgggacggggtcagatggacagaaagtgccagttccgagaagatttgcgcgatatccagatcacggatttccgccggcgtttttccctgatacagcgcgataaccagcgctaccaggcctttgacaatcgcggcgtcgctgtcaccggcgaaccagacccgcccttcctcgtcctgctgcatgaggatccagacctgactctgacaacccgatattttatactgcggctgccgctgtgcttctgtcagcgccggtaatttttcgcccagctcaatcagatacagataacgttcctcccagtcatgacaacgggagaaattgcgcagtaattttgcctgatccggcagcgtaattttcatcaggatccttaacccagcagttttgcggtacgtttcagtgcgtccgtcagtatatcaatatccgtttccgtggtgtagagcgccagtgaggcacggcacatggcactgacaccataatgcgccagcagcggctgtgcgcagtgatgcccggtgcggacagccacgccgtagcgatccagaaatgcgccggtatcaaaagcgtgatgcgtcccgaggttaaaggcgatcaccccttcccgcagtgcattgccgtacagaataatgccgggcacctctgccagccgcgtcagcgcatactgcatgagagtgtgttcatacgcggctatctccgccataccgatgttattcaggtaatccagcgcagctcccaggccgataataccctggatattgggcgttcccgcctcaaaacgccacggtacatccgcataggtaataccgttcgtcaggctgacctctgcgatcatggcaccgccgccttcgcggggtggcatgttatccagcagagatttgcgtccccacaaaataccgatgccggtcggtccgtacagcttatggccggagaacgcatagaaatcacaatccagcgcctgcacatccaccggctgatgcatggcgccctgagcaccgtccaccagcaccgccagttctcccccggcagcacggctcaattcacgcgcctgcgcaataatcgctttcaccgggttcacggtgccgagcacattagaaagatgggtaaagctcagcagacgggtgcggttatcgatcagttccggcagtttactcagcaccagagtgccgtcatccgccatcggcaatacacggatttcaatccccgcgctctctgccagcatataccagggcacaatattggcgtgatgttccatctccgtgataatgatattgtcaccatcattgcagaatgcgcgaccaaaactgtctgccaccagattgatggcttcggtggtgcctttgacaaaaataatctcttccgtctgcggcgcattgataaacgccgccgctttctgccgcacggcttccgtggcagccgtggcctctgcacttaatgtgtgaatgccgcggtgaaccgcggcataatggtgagccgtaaaatcactcaccgcatcaatcacctgctgaggtttctgggcgctggcggcactgtcgaggtagaccagtgatttgccgttcacctccccggccagtaccgggaagtctgcccgctgctgttgtgctgaataactcattactgtttatccccctgatccagcgactgacggatacgcgccatcaccacgttattcaggacttcatcgctgatcgcatccgtcagttctgcagcaaacgcgaggatgatcatctgcttcgcggctttttccgcgatcccgcgtgtgcgcagataaaacagctgttcctcatcaatccgcccgaccgtcgcaccgtggctgcacttcacatcatcggcatagatttccagctgcggtttggtatcgatttccgctttccggcccagtaacaggttattgttggtcatctggccgtctgttttcagtgcatgcggtgccactttaatcatgccgttaaataccgcacggctgttatccatcacaatggttttatggcgctggcggctttcacaataccctttgttatgttccaggtacgtgcgggtatcagcgatttcgccgtgtttcggcagcacaaggctgttcatggccagcacaataccttcgccgttaagctgtgtgctggtgtgatgccgggtcagtttaccgccgagcagaaaactggtgctttccacacgggcatgggcggcgatcaccaaatcattatgggcaaaatggtacgcctgcgggttttcaaaccccagtttcagatggcggaaatcactgttttctcccacgttcgcggtcatccgcgccccggtgaaatgggctgattgttcatccgggctgataaagtgctcaatcacagagacagccgcattcacaccgatatcgaggtgatagcggctgtggcgcatattcagagaatcattatgtgccgttgaaatattcacgatgtacagggatttttccgcctgtgcgccggctttcacgcggatcattaacggtgtctgcgccaggctttcagtcaggtgcaggaaaatctcgccgttaaccggtgccgggaattcattgtgacggtcagccactgacaactcaaacacacctgtatcagtatcactccactgcggcgcaaatacaccgtccaccagcactatgcggtatgcattcagtgaggtcagcaccgcctccggtaagacgttcagtgttccggtcttatcctgataatctgcctccagcaatggtgtcagcgacgtataatgccagtcttcctgatgaaaggccgggaagccggttttctgtgcctgctgccagtgctgcgcggcgtgcccggagagcggatgctgcgcgataagctgttctatccgccccattgcggccagattgcgctcactgacttcgcggcgtttcagcgcgcgttcactgttggtcaataagccagccatatccctgctcctccagttttttcgccagtgagaaatcaccggatttgatgattttgccctgatacagcacatgaacaaagtcaggcttcacataatccaggatgcgctgatagtgagtgacaataataaaggcgcgttccgggctgcgcagctgattcacgccgttggccacggttttcagggcatcaatatccagcccggaatccgtttcatcaagaatgcagagtgacggctcaagggcggccatctgcaggatatcattacgttttttctcaccgccggagaacccgacgttcaccgcacgcgtcagaagatcctgcggcatattcagcaactcaattttatcttcgataaaatcagcgaaatcaaagcggtccagcgcctcttcaccacgatactcgcgcactgcattaactgcggtttgcaggaaaaattggttacttaccccgggaatttccaccgggtactgaaaggcgaggaaaatgccttcaccggcacgatcttccggtgccagctccagcaggtctttacctttaaaagtgaccgacccgctgtcaatttcatactcttcccggccggccagtgtggcagacagggtacttttaccagaaccattcggccccataatggcgtggatttcccccggtttcacgtccagtgataaccctttgaggatttcgttaccttccacgctgacatgcaaatcttttacacttaacataatgtactactccgtcccgccggttatcccgcaggcgctgattctgatggattaaccgacactgtgttccaggcttatcgccagcagtttctgtgcttccacggcaaattccagcggcagctcagagaacacatctttacaaaaaccgtttacaatcattgagatggcgtcatcttcgctgataccgcgctgtaagcagtaaaacagctggtcttcaccgatacgcgaggtggtggcctcatgctccagttgcgcactgttattcatcacttccacatacgggaaagtgtgtgcgccgcactctgtgccgataagcattgagtcacactgagtaaagttacgggcgttttccgcccccggcagcaccttcaccagtccccggtagctgttctggcttctcccggcggaaatccctttcgagataattgtggatttggtattgcggccgatgtggatcatcttggtaccggtatccgcctgctgtgtgccgttggtcagggcaacagagaagaattcaccgacagagttatcccctttgaggatcacactcgggtatttccaggtgatagcagagccggtttcagactgtgtccatgacattttggaattttcaccctcacacagtgcccgcttggtgacaaagttgaggatgccgccttcactgtcaccgccggagaaccagttctgaacagtggaatacttcacttccgcatctttatggatgatcacttccacaaccgccgcatgcagctgataagtgtcacgcaccggtgcggagcagccttcgatatagctgacataactgccttcatccgcaatcagaatggtgcgttcaaactggcctgttttggctgcattaatgcggaaataggtggataattccatcgggcagcgcacccctttcgggacataaacaaaggtgccgtcagaggcaaccgccgagttaagtgcggcgaaaaagttatcgtgattggataccacggtaccgaggtatttttgcaccagttccggatagtcgtgaatcgcttccccgaacgagcagaaaatcacaccgtgttttttcagctcatcacggtaagtggttgagacggatacggagtcaaaaatcgcatccaccgccaccgcctgcccttcgcgaaccggcacgccgagtttttcaaaggcttcttccacttcactggtcaggaaactgcccgccgggctttgcaccgcccccggctgtgagccgcaggtatcatcacacgagccgcatgacggcgcggagtaatagctgtaatcctgataatccagctgcggatacttcgccttcagccagtgcggctcttccatccccagccagtgctgaaaagcctccagccggaaattgagcatccactccggttcatttcgtttggcggaaatggcgcggatcacattttcgttgatccctttcgccagttcatccgtggcgacgttagtgaagaagccctctttatagcgtccgtcattcagccaggtctggacgtcttcaccaatctctgcattgctctgagacataatatggcttcgctcttaaaccccgaagctttcaccacacccgcaggcatgctgagctttcggattattaaatttaaatatctgattcagcccttcacggacaaaatccacttccgtgccgtcaataaacggcatggctttgcgcgggacatacagccgggcgccgtcgcgctcaaacaacatatcctctgcatccgcctgattaatcatttcaaaaacataaccaaacccggcacaaccggattgtttgacactcaggcaaagcccgatactgtccggggtgtttttcatcagtgtcacaatctgctttgcagcggccgctgtcagtgtgatacctgtccagtcattatcattcagtgaaaaagtttccaccgggttggtgctgtgcgttgtcattattgacctcataaaattcgacgggagctctccgtaaacatcatgttaatgataatatttctcacttcaaccacttgctttgaaaggatattccgattgctgcttaaataatagacaaacatgtcgggcgggcgttatcatttttgagcggaaaatgaattaatcttttgtttataaaagagattatttatcaatgataaatacttattaccgtaccagccagtacagtatcaatggcacaaaaggatcattataaatacgacttttgaagagaagtgccggtacacggaaattccgggcggaattcacgcaataccggctgacatgttgctcaggtgttaattttttgacccgcgcagaatcgcggtggtcagacgggaaatacagcataaccgctgctgctcatcaaaaatctcaatagaccagacctgctggttgcgtccgaggtgtatcgccttgcaataaccggtaacaacaccactgcgcaccgcacgcacatggttggcgttaatctcaacaccgaccacggtttcatccccttcactgcacagataaccggccacagagccgaggctttctgccagtaccaccgatgccccgccgtgcagcaggccgtgcggctgttttgtccgctcatcaaccggcatcgtcgcgattaactgctccggctccactgccgtgaagacaatgcccaggtggctgagcatattcccttccgagatgcgattcagttctgccggtgttgcaggtcgtttccatatcattaatcagttctccgcgtcgtgttttatcccgctgtcaggataccagtgtcagcagcgcctgcaacgggtgcagcatcactttgccttccatccgttttacctgactgcggcaggaatatccggtggtcagacagcgctctgatggcagtgactggtacggctgcgcccaggaaagctgataaatccctttcgagcgcgccaggttcggcatctcatgaccgtaggtccccgccataccgcagcagccggtactgacagactgcagtgaggcaccaaaacggcggaagagattctgccagattttcacactgtccggcagtgcagtggcctcggtacaatggctgaacagataccaggggggagtatcctcactgatatctttcaccggtaataaatccgcatattctgtcagaaattcatggactaacatcacgcgaaactgctgtttctccggtggcagaacagttttgtattcatcgcggtaacagagcaccagcgccggatcgacacccgccatcggacagccgagccgtgccacccggttgaggaaatccgccgttttgtttgccgtacgggcaaagcgggcgagaaaacctttaatatgctgcgcttttccgttcgggctgaacggcagcagcaccggctgaaaaccaagcttttccgtcagtgcggcaaaatcggccaccacttttgcgtcaaaatagctggtgaacggatcctgaacgataaagagatagcgcccggcgcggcgctgttcctcactcatactttccagcatttccagggtgacggaaaccgcgttgctccccgccagctgctgtttcagtgacggtgacgacagcagcggtaaatcggtcatacccactgctttttcactgagtttctgcacccacggctgtttcaggaaaaagttaaacatcttcggcgctttcgccatcagcggtgcaccggcttccacattcgccaccagatggtcgcgcagcgggcgcagatagcgtccgtgatagagcgccagaaaccgggcgcggaattccggtacatcaattttaatcgggcactgtgtggagcaggctttgcaggccagacaaccggacatcgattccttcacttcatgggagaaatcatattccccgcgggatgcccgccgcgtattgccaattttttcaatcagaccacgcagagagatccggctctgcggtacggcccgtgataacagcgccgggtccgtgccctgctctgtcagcagccgcagccattcgcgcaccagcccggcacggcctttcggcgagtgaaagcgtgattgcgtcactttcattgacggacacatcgggcttttgacatcaaaattaaaacacaggccgttgccgttacagttcatcgcgccggaaaaagtatttctgacctcaacggggattgttctgtcataggtgccgcgcttgatcgcatccacctgcatcatcggtgcgtcactggttaacggcgcacaaattttgccgggattgagccggttttccgggtcaaatgcccctttgatacggcgcagttcgcgatacagcgtgtcaccgaaaaaagcctcactgtactgtgcccggaaccctttaccgtgctcaccccacagcagcccgccgtatttggcagtcagcgcgacaatatcatcggaaatctgcttcatcagcatttcctgttccggagagcacatatccagcgccggacgcacatgcaatacgcccgcatccacatgaccgaacatgccgtattccaggtgatgactgtccagcagcgcgcggaactctgtgatgtaatccgccagatgttccggcggcacacaggtatcttcgacaaacgggatcggttttgccgcccctttactgttaccgagcagacccaccgcttttttgcgcattgcataaatacgctcaataccactcagttcacggcagacctgatagccaatcacacccgcttcattatttgccattaatgaatccaggcgttcacacagtgacgcaacctgcccgtcaatcagtgcttcatcatcaccgcagaattcgacaatatttaatcccagcaaggtcttatccggcacatccgtgatcaattcactgacggaatgccagacgatatcttctcgcgccagattcagcacttttgaatccacggtttccactgacagcgcctgagcctccaccataaacggggcattgcgcagtgcggaatcaaatgcatcatatttgacattcaccaggcggcgcacttccgggatcggcgtgatattgagttttgcctcagtgatcaccgccagagtgccttccgagccggtcaggatgcgggtcagatcaaaggtctgcatatcatcactgaagacatggcgcagatcataaccggtcagaaagcggttgagcttcggaaagctgtccagaatggtctgccggtgagtttcgcaactctccagtgtggtgcggtaaagttcccccgccgcactttcctcctgtgcacagcgccacgcctcgctgaccggcagcggcgcggtatccagcagatcaccgctaagcagtaccgagcgcagccccagcacatggtcagaggttttgccgtacaccagcgagccctggccggaagcatcggtgttaatcattccgccgagagtggcgcggttggaggtggataactccggcgcgaaaaaatagccgtacggtttcagatacgcattgagctgatctttaatcacacccgcttccgcccgcacccagccctgctccgggttaatttcaagaatgcggttcatatagcgggataaatcgatcaccacaccgttattcagcgactgaccattagtgcccgtaccgccgccgcgcggggtaaaggtaaccgaacggaattcatcctgtgcggcaaggcgcatcaccagaatcacatcagcggtcgaacgcgggaaaacgattgcctgcggcagaagctgataaatactgttgtcggtcgcgagtgtcagccgatcgccatagcgggtggtggtatcgccggtaaatccgctttcattgagggcgtgaatataacgttcaaccgccgggcttacctgtggggattgcgttaatcgtgggatcattatctgcggctcttttatcataaatggtcacattgcaaatctgacaatataattatgtggttaactcttcattctgatgcatgattcatgcgagaatattcaccttaacacacaatgtattcattttgcgcctgcaataaaataacgcaatatttgcgctcctttatcgggaacaaccagttaattcatttacaaagggaaacttatccgtggaaaaatcgcaaccgggttatgatttacctaaactaatattcgccgtcggagcgatatcaattctcattgtcattagtttttgggtattaagtccgtttcttccgggcttcgtctgggcgggtatgatagtgattgccacctggccggtttataccgcaatccgccgccgtgtccgtaacagccgctggatagccgcatctgtgatggtcatgctgattattctgctgtttgtctttccgctggcgctgcttatcaacagtattgtcgagaacagcgagccgctgatgcgctgggtcaaatccccggggcagctgacactgccggagctctactggcttgactcaatcccggttatcgggccgaaattgtttgccagttggacaaccctggtcgccagcggcggcaacgcgatgatggccaaaatccagccttacctcggacagggcgcggcctggttcctgactcagttgctgagtgccggtaaattcctgttccatctggcgattatgctgctgttcagtgctctgctctatcttcagggtgaagaagcgatgcgcggtttccgtcactttgctctgcgcctcgccggcatgcgcggcgatgccgccgtactgctggcagcgatgtctgtacgcgccgtggcactgggtgtggtggtcaccgcactaactcaggcaattatcggtggtctggggctggggctggccggtgtgccgtttgccgccatcctgacggtgcttatttttatctgctgtgtggcacaactcggaccgctgctgattatgatcccgtccatcatttatctgttctggaccggagataccacctgggctgtcgtcatgattgtctgggccggtattgttgccaccatggatggcgtattgcgcccgtacctcatcaaaatgggggcggatttaccgatggtcctgattctgaccggcgttatcggcgggatgttatcgctcggaatgatcgggctctttatcggccctgtcgtgctggcagtttcttacacactgctgaaagcgtggatgaatgatgtgccgaagccgtcagatgacctgaccgaggttcgcgcttatatggaagaacaactctcagaaaaagaataagtttttaatcagaggtgcagaagtgcacctctgatatatttaattaattattcaaatatggttcataaatagcattaataatttgaaatattaatatacattgagagaattgcaccggacttattccggatacggacagaggttctgaatatatttcacttatctaacaatcagtaaatatatatattgagacaattcttaatgcaggcatatcttaattattttaatatatcagccatcaagtaacgaattaaaaggtattgttattcattacaatgataccttccgaatacaaatattgctgtgtgtagtctttgcctgtcagcccatgataggctttttttttgcctgtaattcagggtatctgatttggttttattttgatttgccttaagtgcgcacagacattctaacactgaatacgaaaaaaaagcccgaaataatccgggcttttaatcattttaaatgattgaatcagtgattttctgctaatgaaatccaggttttcactacagtatccggattaagagaaacactgtcgattccctgctccatcagccaggcagcaaaatcctggtggtcggatggcccctgaccacagattcccacatatttgttacgtgctttcgccgctttgatagccatcgacagcagcgctttcaccgcatcgttacgctcgtcaaacagagtggaaaccacaccggagtcgcgatccagacccagtgtcagctgtgtcatgtcgttggagccgatagagaagccatcgaaatactcgaggaactgatctgccagcagtgcgtttgacgggatttcacacatcatgatcagacgcaggccgttttcaccgcgtttcagaccatgaaccgccagttcattcaccacggcttctgcctgtgccacagtacggacaaacgggatcatcacttcgacgttagtcaggtccatatcattacgcacacgtttcactgcttcacattccagcgcgaaacaatcacggaaatcatcatgcacataacggcctgcaccacggaagcccagcatcgggttctcttcatgcggttcgtagatatccccgccgaccaggttggcatattcgttggatttaaagtcagacagacggacaatcactttcttcggatagaacgccgcagcaatagtggcaatcccttcaaccagacggccgatatagaattcaaccggatcatcatagccctgcatcatgctgcggatttcagcctgtaattccggagtctgctgatcaaattccagcagtgcacgcgggtgcacaccaatcatacggttgatgataaattccagacgtgccaggccgacaccttcatgcggcaggcaggcaaagtcaaatgcacggtcagggttaccgacgttcatcatgattttggtgcccacttccggcattttatcgatttcagaagagtggatatcaaaatccagtttgccgccgtagacgtaaccggtatccccttcagaacaggaaacagtcacttcctggccttctttcaggagttcggtggcatcaccgcaaccaaccaccgccgggatccccagctcacgggcaatgattgccgcgtgacaggtacgaccgccgcggttggtaacaatcgccgccgctttcttcatgatcggttcccagtcagggtcagtcatatcagtgactaacacatcacccggctgaatacgatccatctggctcaggtcatggataactttgaccacaccggcaccgatacggtgaccgattgcacggccttcaaccagcacattactctggccgttcagctgataacgttccatcacctgctggttagagcggacggtttccggacgcgcctgaacgatatacagtttgccgttgttaccgtctttcgcccactcgatgtccatcggacggccgtagtgtttttcaatggtaacggcctgttttgccagttcttccacttcgctgtcggtcagtgagaaacgtttgcatttttctgcatccacatcctcaatacgcacctgtttgccgtggctggtgtcatccgcataaaccatctggattttcttggaacccatggtgcggcggacaatagccggacggcctttttccagggttggtttgtggacataaaactcatccgggtttaccgcgccctgtaccaccatctcacccaacccgtaagcggatgtgataaagacaacctggtcaaaaccggactcggtatcgatagtaaacatcacgccggaagacgcgaggtcagaacgcaccatgcgctgaacaccggcagacagtgcaacaccacggtggtcatagccctgatgcacgcggtaagaaatcgcgcggtcattaaataatgaggcaaatacgtgcttgatggcgaccatgatcgcatcaataccctgcacgtttaagaaggtttcctgctgtcctgcgaaggaggcatccggcatatcctcagccgttgcggaagaacgcacagcaaaagatgcgcctttctcgccttcggacagctgctcatacgcgtgacggatgtcctgctcaaattccgcggagaacggggtatcaattacccatgcgcggatctgcgcaccggctttcgccagctggttgacatcgtcaacatccgttttatccagcagctcataaatgcgctggttgacgccactttgctcaagaaagtcattgaaggcctgtgccgtggtggcaaaaccattgggaacagacacgcctaatccggaaagattggttatcatttcgcctaaagacgcatttttaccaccgacacggggtacgtcattcatacctaactggttataccaaagtacattacacggggtttgaccattgttggacattgcaagcaatccttttaacattcaaaagaaggtaaaatcggaaatacgggctctgctgagcatcagaaacagattatcacaatgtttgtaagaatatagacaggtgaatcgatcaacccgattacaatatttttttatcctttataatcatgttttaatttatttgtgccgttgctccggattatcgattcagcaaaaaacataggaaaataaataacatgtctatcacaaccggctcatcttctgatacacaaaataaagaaacacggagtgtcttctttatttctgacggaacggcaattacggcggaagtattaggtcatgctgtattgtcacaattccctattgatattatcgcttacaccctgccgttcgtggcaactgtcgagcgcgcgctggaaatcagacaaaaaatcgataccatttttgaaaccaccgggttacgccctctggtgttctactccattatctgtcaggacgtgcgcgaagccatcaccggcagtcagggctgctgccaggacatagtgcaaaccctggtcgcgccgattcagaaagagattcagatggatccgcagccgatattcaaccggacccacggcttatccaagcgcaatctgagccagtatgatgcccgtatcgcggccattgatttcgcactggcacatgatgacggtgtctccctgcgcaatatggatcaggcgcaggttattctgctcggcgtttcccgctgcggtaaaaccccgaccagcctgtatctggccatgcagttcggtatccaggccgccaactatccgttcaccgcagatgatatggataacctgcagctgcctgcggccctgaagccgtataataataagttattcggtctgaccattgaccccgagcgtctggctgctatccgcgaagagcgccgtgaaaacagccgctacgcctcaatccgtcagtgccggatggagctggcagaggtggaagcgctgtaccgcaaacacaaaatcagctacctcaataccaccaactattcggtggaagagatatcgacaaaaatcatcgattctctgggattaaaccgccgtatgttctgacagcggaaacggttaagtggatcacattcccgcggtgatccactttctgcaattgtatcttgtaatcatcacgttttcgtttattgtgatcggtatcactgtggtttaacacagcaactgaccgaattcagagacagcactaatctatggaaaaaacggatgaactgcgcacacgggcgatagacaaactgatcaccccgtctgcgctggccggtgagtttccggccacagaagcaattaataagaatgtcaccacatcacgaacccgcattgaacgtattttaaccggcgatgatccgcgtctgctggtgattgtcggcccctgctccgtgcatgacccgatcgccgcactggattacgcacagcgcctgagcgaactgctgccgaaatacagctcacgccttgaaattgtgatgcgcacctattttgaaaagccgcgtaccgtggtcggctggaaaggactgatttcagatccgcgtctggataactcctgtcaggtcaatgaaggtatccggctggcgcgcaaactgctgatcgacgttaatgcactgaatgtcccgacagccaccgagtttcttgatatggtcacggggcagtatattgcggatcttatcagctggggggctatcggtgcccggaccacggaaagccagatccaccgcgaaatggcctccgcactctcctgcccggtcggcttcaaaaacggtactgacggcaatatcaaaattgcgattgatgccatccgcgccgcacaggccggtcatatgttcctgtcaccggataaagacgggcagatgacgatttatcagaccaaaggcaatccgttcgggcacattattatgcgcggcggtaagacaccgaactatgctgccggtgatattgctcacgcctgtgatcaactgcgccagtttgatctgccggaacatctggtgattgatttcagccacggcaactgtcagaaaatccaccgccgtcagctggatgtcgccaaagatgtcgcacagcagattaaagacggctcgcgggctatctccggtgttatggccgaaagctttattcaggaaggcacacaaaaactggtgaatcacaaagcgccggtttacgggcagtcaattaccgatccgtgcctgagctgggcagataccgtcaccatgctggatattctggctgatgcggcggatgcccgtttcagctgaaactattcccttgttacgaaacaggatgcacccgcatcctgtttattcatcacccgcagttatcattccttccccatatagttgagatgccgctcactttttccgtgtaaattccctctctcggaaaaaatcacttgaaccactctcgtcagctgctgataataatttgcgaatgcgaattgatatcaaataaaattatatgactgaaaataatcagaattatgtgatatccgtacttaccggatataaaaatacagcaacagataaaatcacggttatcagcagtgaagcactcctggggccgcagcagcggattattatccgccaccagaatgaggaatatcacctgcgcaggactaaaaacggaaaacttattctgaccaaataacacacaggccagccacctgtttccttaaggcagccagcttactttttaataccggttatccggtctgcgccggtttggtgcagatcacgaaaaagtaaggatctgctatgcacagtgaaacactctcccgttaccttgccctgaaagaacagggacatcttatccacgcccgtgatatcgccgctgagatgggcatatccgaggcagaactggcacactgccgggccggttatgacgcctgccgcctcacccgggatatccccgccattttccggatgctgggtaccgccggggagctgaaaggcatcacccgcaatgaccacgcggtacatgaacataccggcacctatgataatgctgaattcggggaacacgcctgcctgctgctgaacccgtacgggctggatttacgcttttttctgtctcagtggcagacagtatttgccttcgcggaaaatactccgcgcggtctgcgccacagccttcagttttttgaccgccacggagatgccgtccacaaaatttataccaccgctgataccgatatgggggtctggcatcacctgacagcacagttcgccgcgtatgataacccgcaggttgttccggaaccggccgtcatcccggcctgcacatcactgacaccggagcagcaggctgaatttacccgtcactggcagcaaatgacggatgttcaccaattttttgttctgttaaaaatatttaatatcagccgcttgcaggcattccgttgtgtggataacaccctggcacagcgggtggataacagcgcgttatcacgcctgctcactcagtgtacggaagaacagaatgacattatgatctttgtcgccaaccggggctgtgtacagatttttaccggcgccattggccgggttgaaccttatatcagcccccgcgacggacagcactggatcaatattttcaatccgtcgttcactctccatctgatcgaatcggctgttgcggaatcctggattacccgcaaacccaccaaagacggtattgtcaccagcctggaattatttgataaaaacggtcaggctatcgcccagctgttcggacagcgcaccgagggtgaaccggaacaaacgatctggcgcagtcagattaatgccctgctgacagactgcagcggtgaggcggcggcatgaaaaaatatgtcctcctgctactgctgctctgtttttttccgtctgcacgcagtatgcagggcagcattattacccttggcggtgatgtcacggagattgtttttgctctcggtgccggtgacagggtaattgcccgtgataccaccagcgagcatccgccgcaggtcactcagttgccggatgtcggctatctgcggcttctgaatgcggaaggtctgctgtcgcttcagccttcactgatcctcgccagtgaactggcttatccttctgccgttttatcgcagatcagcgcggcgggtatccctgtcgtcactgtcagtgctgcggcagaactaccggctattaccgcgaaagtccgtcagattgcggaggctctggccttacagtcagccgccgctgtactggtcgctgacattaaccggaaactggatgctgtaccgcagacaccactgccggtgaatgtactgtttctgctcagccacgccggtactgctccgatggcagccggtacagatacggcggcagacagccttatccgcagtgcaggcggaagaaacgcagccgcttctttccgccgttatcgcccgctgtcagcagaaggaatgattgccgctcagcccgatttagtggtgatcacccgcagcggtctggcttctctcggcagcaccggcaatctctggcagttaccggggctggctcagacacctgccggaaaacataagcgggtattggtggctgatgatatggggtttctcggcttcgggttacaaaccccggatacactgcatcagttacgtgaagcgatggaggcagcagccgtgttatgaataatccgcccgcctttcatctgcgccgcctgtgcctctgttttctgttggtgatcatgatattgacggccatgaataccggcggactgccggtttctgtcagcgcattcctgcggggtgaagtaaccccgcaactctggcagatctggttatctgtccgtctgccgcggattgttctggcagttctggtgggtatggcactggccaccgccggggtattattgcagggattattccgcaacccgctggcagaccccggtttgctcgggatcagcagcggcgcagccgttgcggtggcactggggattgtctttatcgcgccttatctgagtggtgcagtcacactgtatctgcatattattactgccttcagcggcgcactttgtatcagcgggctgatttttctgctcaaccgccgccgtcagcctttgctgcgtctgttgctgtgcggcattgccgttaacgcaatcagtatgtcctttgtcggcgtgctcaattatctgagtgatgataaagaattacgtcagttttcactgtggatgatgggcagcaccgggcacatcagctggactctgcttctgcctgctatcgtgctggcactccctgtgttttatgccgcattcagactggcacgtccgctggatatgattcagttgggagaagaagaagcacattatgccggagtgaatgtccgccggacacaacagtgtgtcctgctgatcagtgccctgctcaccgggattgccgtggcactgagcgggattatcggttttatcggcctggttatcccgcacctgatgcgtatgattttcggctggcaccaccggcttctgctggtgacatcagcccttgccggtgcactgctgttactgctctccgatacactcgcccgcacactggtggtaccagcagaaatcccggtcggattactgaccggattacttggtgcaccctattttctctggctgattttctctgtgaaggaatgatatgccccgtataaccgtcaataatccgccaccggtgctggttgcagagaatgtcagtttttcccgtcacggacagccggtagtcagtgatatctccctgactttgcactgcggaaccatcactgcggttaccggcccgaacggcgcaggtaaatcaacttttcttcgtttactcagcggctattatcgctgtgacagcggtcagatcatgctgcgcggaaaaccaatggcgtcctggtctgccggtgcactggcacaaatcagggcggtcatgacacaacaaagtgttatctctgccccctaccgggtcagagatattattgcattgggggatttgcacagagagtacatacaccaatcaaccacagatgaagtgatacacctgacggcctgtgaaccactgctggagaaacgctggtatcagctttccggtggtgaacaacagcgggttcatctggcgcgtgcactgatgcaactaagctgtccgctgcctctccctcgtctgttattactggatgaaccgactgcagcactggatcttcatcaccagcaacacctgatgcggatgctgaaacagcgtgtaagtgcaacctccctggcggtcttctgcattctgcatgacctgaatctggcctctttatatgctgatcacgtcataatgctgaataacggccgcattgtccgtcagggaacaccggccggggtgctgcaaaaaacggtactggcggaaacttatcaggcagacctgataacgctccgccatccgcttaccggcaatacatctgtgttacttgcaccttaatgttgatcaggttttgccgtaacccgttgtttgcggcaaaacatgattgccgaaagcagacataaggtgtagccgagtaattcacagccttcttcggccaagttttttgccagccggttaaaatcatcacccatcataccgcgccataaaattcccataccgaacaggcgggaaaaaaccagcaccaccagcaaaccggtaaccatcatgccgtatgccggatgagagacaaaacggtacagcccgttaaccgccgtgcgcggatgcagaaaagcatagataatcgcaatcagcgagaccgggacagcaaaccagaaccatgctccgtgggaaatatagtcaaaaatctgatccaattctctgatcagcatgctggcaaaaaatccggctatcagaaaaaagcccgccctgtcctccggctcccgcagccctttgcgaaataacagcacaatcactgccagcagcatcacctcagcaacaatttctgtcaccgagtcttcacccaaatcattcttaagaaccagaatatcaataaacaacagacctgtactggcagccataatcagtgccagcataaaaaaacgtcccattgccccaaaaagaaaccgaaattgctgtgacataaccatcctgaattatatttatcgtcggaagattctatcgatattgaaactataattggtgacatatggtgctatatgctggtaataaaacaattggtttcatctattggtctgataatgattctcaatcatgaaaggcacgatttgcctacacaattcttggaaaattcataaaatatggttaataacatatgtgactattaaaatttatagattgtaagcccgattttgggaggtgaacatgtcagaaagtgtagtgaacgatattatcaaatggctggaaacccagttacagcgcaatgaagggatcaagattgatactattgcggataagagcggttattcaaaatggcatctccagcgtattttcaaagatatcaagggatgcacattaggtgagtatgtccgtaagcgccgcctgctggaagcagctaaatctctgcgcgataacgatatgtctattctggatatcgcgttgcagtatggcttcagctcacaggcaacctttacccgcatctttaaaaaacatttcaataccacaccggcaaaattccgtgatcacggtcagttgccggaaccgcgctgttttatggagtgcggttcacactaaacagctgaaaaaatatccccgcctgccgcaaccggccaaacggggatattttttattctgctgctatcacgccgcaggcaatccgagcgccgccaccacctaatggtgccggtgaatctgaatgattgtcaccgcccgcatgaaccataatggcatgccctttgatctctctgagttttttaaggcgtggtgccagcacctgcgtggtcgctttcccgtcatcagtcacatacagtgccggcaaatcgcccaaatggccgtcagcatatggcccggcatgaacttttgtacctgccgggtcaaaatggccgcctgcggccagggcaggtaccggtttaccctctttctctgcagcatcacaggacggattttcgtggatgtgaaacccgtgcacgcccggcggtaacccattcagcgccggtgtaaacagcaaaccataatccgtttcctgaatatcaatagtgccgataaccttaccggcacctttttctgtcgcttcatgcagggtaacgcgctcagttgcagccagggaggttgatgcccccatcaggattaacaacggaatgagttttttcatcatatgctccttcagtttattattcctcacctatcctacggcaccgacccggattgtctttcagattaacggcatattttactgaagctctgccaccaaccagtcccgcaactgaattagctcatcgtgcatgtccggataaccggccatcagctcagtgaataccgccgttacagcatcagcgctgtaccgctgaccggtcagcagttgtgccagttgctccagcggggccgggtcaaggctgtcagtaaaaatctgcgcccggctgatcatgccgcgctccacatcaaaatgcagttcaatcccgccccatttaaagcgggtatccagcagatggctgaaggccggtgcattgccgaaattccagtcccagctgctctgtctggcaaaggtctcggcaaatcccggcagatcaggaagtgaatccggtgaaatcagttccgcctctgccttttcgccgtaatagtcgaaaaacgcagctttaatcgcttcgcacacctgctcatggtcaatcccgggaataatttccgtcagattggtcacccgcgagcggacagaagtgatccctttggcctgcaatttcttcggatccggattgagataatccgccagacggcttaaatccgcattaattaataccgtgccgtgatggaagccgcgatctttggtttcccggtatgccgagccggaaattttccgctcaccgtcttcgcagttaaccaccaaatcattacggccggatgccgataccgaaatgccgagccgggataagccactgagaataatattggtggaaaccgttttgtcatattccggtttcccggccataaaggtgaaattcgtatttcccttatcgtggaataccgccccgccgccactactgcgccgggctaatttaatatggtcagattccattttgcgggtattacattccttccacgggttttgtgcccggccgataaccacggtgtcattattgcgccataaaaacagcacgcgctggtcagcaggcatctgccggaaaatacactcttcaacggcaaggttaaaccacggatcaaaggaatcagaaataaaaagacgaagtgacgacatgttgtcccccggaaaaaataggctgccgataagatagcatatttatcccggtgattttaaagtctgcgcgcctgccagaagacttttttccagtaaacgttatccaggctggaacgcatcacacctttgctggtcgaggcatgaataaaggcacggtcagaatcataaatgccgacatgtaacccgttctcgccaccgccggttttaaagaataccaggtcaccgggctgtaaatcctcaacatcgatccgggtgccgtaggttgtctgcgctttggtggtgcgcggcagagaaatagcgaagcggtcattaaatgtccggtagacgaaaccggaacaatcaatgccgtttaaatccattccgccgtaatgatatggcgtaccgtaccattgcgataattgttcccgcaactgggcaatcaccataatcgggtccgataattctgttttgatcggcggtgcatgatatttacgcggcgttgatgaacagccgacaacggctaatacgcagataaaaagcagagaacggaatatgattttcattgtattatccccggtgcggcagaccttcaacccgcattactgtattaatatctgcgggtgaaagtcaatatttgccgtattttaccggatgttaaggcattttccggtaatacagtaatgtcaggttttcatcagtgaccatttcatcggccggtgagacatcgttctcatccaccccgtgacgatcacgcagaatcagcgcaacattaccggttttacgagcatttttcagccaggattcgaaatcatcatgcgaaatgaacctttcccgggtatccggatataagtcactcagcccgtatttcagttctcccgggcgatcaaacatataaatatcactgcgctgcaattcccatgctgctgatgtaccgatgccaacactattgaccagaatataacgggcatctttcagcaatgcggcattcttctgaataaagatctgcggtaagtttgcccgttcagtccgctccggtaacagtgagctgactgataaactgatcgccacggtacaaaatgccgcgagcatccagtagcggcacccttttatcagggttagcgctgaaaccacaatccagaacaggaaaatcgcaatggcgccgataaatttaccgcgctcagcggcagaatacaccagggtattttccagattattgattaccagcagggcaataacggcgcaaccgccaaaaataatattgatcaccgcgttcagtttaaagattgaaacggcttgtttcttaatcagagtatggatatacgctgccatcaggatcgtcagtggtgcaataaccggcagaatataggtcagtaattttcctttggcgatactgaaaaataagaacggtaatactgtccagcacaacaggaagaataatggcttattttcacggcgctgttgccagccctgttttaatgccccgaataaaaaaccactccagggtaaaacaccggcaaacagaatcggaataaagaaccagaacggcgagaggttttgcgcctctttactcataaaacgctggatatgctcaaccatcacaaaatagcgccagaaatcgggctcggcatgatatatcgccagcgcccacggcagcgtgataagcccggcagccgcaattcccgcccagcaataacagagcatggttttaaagcgatggtagaaaatatgcaccggtatcagtgcaataacaggcagcaccaatgccagaaagccttttgtcatcagcgccatgccgcaggccagcccgaaggtgatccagtagcccagcaatgcacggcgtgactgtgcggtagtcaggccataactgaggtaaatcaccagtgtgacccacatggtcagaatcggatccagcgtactgtaggttccgagagcaagcaccagtaacatactggcatacaggaaggccgctgtacgggcgatgactttctcatcccacattttcattgccagccggtaaaccagcaatgtgctgatcatcgtcgagaacaggacaccaaaacgcactgcaaattgtgtgtgaccgaacagcatctgactgatgttatttacccagtaacccgccaccggtttttcaaaatagcggatatccagcagatgcggcaccacccagttgccgtcagccagcatttcccggcttatttccgcatagcgggtttcatccggctgccataacgcacggaattccaaaggaataaaataggtcactgcaataaacaacagaaataacacagcccacattgcggcagacggatacgccacattaaacgcggacttacggctgttaacgtccaatataacctccggacaaggatacaattttataacaataaggtaaccatctctgttacttccattaagaccagagccctgcagaataattcacggaagaacaggatatttttgttatacaagaaagaataaaagggaggattaattcaggcttaacggttaatggcggcttaataaaacagtaaaccgccccgtgactatgcggccggcttctctttgctgtggatcagacgcacaccaaacagaataaaaataataccgatgctttttatcagcgacacaccttcattaaaccagggcagaaaggcagccagcagatagacaaacacatagctcagactgataagcggataggctttattaagcggcaaatcccgcagcgcgagcagccagcacaccattgacagaacataccccgccaatccggcgaaaacgactgcaaacggctgccactgagataacagccagcggatatccagccattgtgagctcagtgcaatatcgggtaattgtgtcacgcccagtttcagcagcagctgagcggcggtgacaaacagcacactgccgagcacccagagatatccgcgcatcagtgtcccgctcccatcagaatcacgccggtgacaatcgcggccacaccgcaccagtgcttgcgggtcacccgctcaccgtataaaaactgtgccaccagggtgactaccacaaagttgatactcagcatcggataagcgatattcagcggcatcacctgcaggagtttcagccacagcagcatcccctggccaagcagaaacaccgccagcgccagccagtacaggcctctgcgttttgcattttcctgcgccgcctgccagacatccaccgcctgtttctggcagatctggccgccgcaggtaagaaaactgacaataatcagtaaaacaatttgcccgaacaccatcacaccttatggctgtttatcatagatatagagggtcatccggctgttttcagtccgtttgtccgccggcggcagtttggcatcgtaggtgtcatttttatctgttaccagtagtgcgacctgcccttttttgcgggtttccgccagccagtcagcgaacgtcgcatcattcagcaaccggtattcgctgtccggatatttcaggccgtaagtcagctcaccggaattattcagcagataaatatcaccgcgtttcagttcccaggccagcccggcaccgatgccgacactgttactgacaataaacggacttttttccagatcagtcatattctggcggataaacgcctgcggcagtttggaatccacggaacgatcaggcaccgcgctgccgaatgtcagactgatcaccagtgagcaggaagccgcccacagccagtgttttgctttcagcagataacagagatacccgattatgccccagatagtaaaggcgacaatgcccagtaccactttggaccattcatccggctgatagattggttttttcaccagataactggcaacgatcagcccggcgaccgccactgcaccaaaggtcaggttcagaataccgttcgcctgtaatgctttcatccggtgtttacgcacacagtcaacgccgtatttggcaatcatcacagccagcggtgccatcagcggcagcatataggtcggcagtttacctttggcaatactgaacagcaggaacggggcaacaaaccagcagaacaggaaaaacatcggcggattattgcgccgctctttccagcctttaaacaatgcgccgggcagtaacgccagccacggcaggcaaccgagcaggatcaccgggatgtagtaccagaccggcgaggcgtgctgggcatcttcacctgagaaacgctggaagtgctccaccacaatgaaatagcgccagtaatccggctcctgctgatgaaccgcaatcgcccacggcaggctgatcagcactgcgcagaaaaccgccagcgggccgaatttcagtaactcaaggaaacgccgctggtacagcatcaccggcagcatagccaccaccgggatcgccagcgcaaggaagcctttggtcataaagcccataccgcaggccagaccaagcaggcaccaggaggttattctggttttcacattttcggctttcagtgccctgaagctgaaggccatcgaggcaatcacccacatggcaaacatcgggtcgagcacactgtatgtgccgacactgaacaccagaaacatggagacaaagaccagcgacgcaacaaatgccgtgtgacggttgcgccacatcaggagggtcatccagtaaaccagcagagtgctgataaggatgctgaagacagaacctgcacggacagcaaaattggtatgaccgaagaccagctggctgacgttattcacccagtaaccggccaccggtttttcaaaataacgcagatcgagtaatttgggaacgacccagtcaccctgtgtcaccatttcacggctgatttccgcataccgggtttcatccggatgccagagcagacgatcattgatcgggaaaaggtaagttaacacgaaaaaaagagccagcagaaaggctccgattttactcgcccggttattcagcatgtaatgctatccctcttgttggcagcccagccacccttcccggccggggaaatcaccccgtaccactttgcctgtcggtaatgttgataaatcagacggcagcagttcgctgagcggacaaaagcggaaatcctcgtttttaatccgatccagcaatgcctcaaactgtgcggctttggacatgccttccacttctgtgtggatagtatagaccggtacgccctgatcccgtctgattgcatcgaggataaagtcgttaaaatccgcatcagccacctgcggccccaccacttcatcataggtcggcagtgtaacaggaatctgcacggttccggtagtcccgtctgcaagaagcggacgaaacggatgcgttccgcggcaatcactgttgtaggcaaaaccaaatgcctgtttagcttcaatcacccgttcatccgcgcgccagcccgccaccgcagagcactgcaccggctgcccggtagcctgtgataaggcatcggtacccagacgaatctgctctgtgatttgtgccggtgtccagcggccgattttcgcctgccagccctggtgatcccacgcatgcaggccgacttcatgaccggcatccagcgtctgtttcatcaggtaacccaggtcacgggctattttcttacccggccacgctgtaccggccagcagaatatccaggccgtataatgaagccgcattggagcgcagcattttccacagaaacttaggacgcaaaaggcgccacaagtgacgccccatattgtccggcccgacgctgaagaaaaaactggctttaatatcgtgctgcgcaaataccttcagtaactgcggcacaccttccagtgtgccgcggtaagtatccacgtcaacccgcaggccgacatttttcattactcgtcgttcctcagctcttcaaccgcaccgcgcaggaagaagtcgagagtttcttccacagtctggcgggtatcgatagtcggtttccagcccagtaaacgctcagcgtttttgatgcttggtttacggtgctccacgtcctggtaacctttaccgtagtaagtgctgctttcgattttacggaagccggcaaatggcgggaagttatcacgcagcggatgtttctcgaagcagtcgagcagcatttctgccagttcgcggatactcgcttcgttcaccgggttaccgatgttgatgatctggccgtcacacttgccgtcacggttttcaatgatgcggaacagggcttcgataccgtcatggatatcagtaaagcagcgtttctgctcaccaccgtcaaccagtttaatcggcgaaccttccaccaggttcaggatcagctgagtgatagcacgggagctgccgatacgcgcggagttcaggctgtccagacgcggtcccatccagttgaacggacggaacagcgtgaatttcagaccttctttcgcgccgtatgcccagctaacccggtcaagcagctgtttggaaacggagtagatccaacgctgtttgttaatcgggccgacaatcaggcgtgaattatcttcgtcaaactctttgtcatcacacataccgtacacttcggaggtggacgggaagatgatacgtttgttgtatttcgcgcagtaacggacgattttcaggttttcttcgaagtccagctcgaacacgcgcagcgggttacgggtatactcgattggtgtggcaatcgccaccagcggcagaatgacatcacattttttgatgtgatactcaatccactcggtgtgaatgctgacatcgccttcaataaagtggaaacgctcgtcaccgatgaaacgatcaatcgcggaagagctgatatccataccatagatatcgtagttgccgtcttccagcagacgttctgtcaggtggttaccgatgaaaccgttcacacccaggatcagcacacgcttacggcgggcaacctgtgcagtggctttcgggccgacgcggacatcagttacgatacccatttccgctgccagacgggcaccctgcacatacaggccggattccccctggccgctgatcacttccagcgcgccgtttccgcaggcaatcaccagcggttccgcagaaataacggttcccggacgtttgcctttgttatcggccagcacgcggctgcgccagatgatcattttgcgctcacccaggaaggtgaatgcaccaggatacggttctgtcaccgcacggaccaggttgtggatctgtgcagccggctgattccagtcgatcagaccatcttccgcacaacggcggccgaagtatgttgcctgagattcatcctgagcggtggttttataagtaccggcctcaatcagcggtaaagttttgttcagcagtgtttctgcggcttcacggactttaccgtgaacaatcagggaagtatcgtcaccaccgatagtgactttttcctgtgcgacaatatcgccggcatcggctttggcaaccattttgtgcagggtaacaccggtttcggtttcaccgttcagcacagcccagttgattggtgcgcggccgcggtatttcggcagcagagaaccgtgcaggttaaatgcgcctttcggtgccagcgccagaatttcttcgctcagcatatcgcggtagtagaaagagaaaataacatccggtttcagttcacggatgcgatccacccacagcgggtggttaacgttttcaggggcataaaccggcaattccatgtccgcgctgacgcgggccaccgatgagaagaaatggttttcacccgggtcgtccgtatgggtaaagacggcctgaatatcaaagcccgcttttttcagggccttcaatccgacacaaccaatatcatggtaggcaaatacgattgctttcattagtttttttcctgagtttcagtttcactggtctctttcgcctgagcgccgaccactttttgaataaaataccggggacgtgcacgaacatcgttataaatccgcccgatatattccccgagcagacccattgccacgaattgtgcgccgataaacataaataagatggcgaacagggtaaacactccctctgccgcccacagcgcgccgaaagccacgcgcagaataatcagtaacagcgccagcaggaaaccggacgccgcgatgatactgccgacaatgcttaacaggcgcagcggcgcggtagtcaggcaggtcagcaggtcatacatcagattgatcagtttgaggaaactgtattttgagtccccgaactcacgttctgcgtgtttaacatcaatctcaatcgttttacgggcaaaggtatttgccagaataggaataaaggtgctgcgctcatggcactgtaacatcgcatcgatgatatgacggcggtacgcacgcagcatacagccgtagtcacccatagcgctgccggttgcggcgatgatcattttgttgatcatttttgaggcggttttgcggaaccaggagtcctgacggtttgcgcggcgtgtgccgaccacgtcatagccctcttctgctttttcaaccagacgcgggatctcttccggcggattctgtaaatccgcatccatggtgatcaccagatcaccaccggcctgtctgaaacccgccataattgcggaatgctggccgtagttacggttcagcaggacagcaaccacatggttttcagggatctctgccgcctgcgtcagcatttctgctgaacggtcacggctgccgtcatccaccagcacaatttcatacgcctgcttcagcgactgacaggctttgattgtacgttccagcaactgagggagactctcttcctcgttgtaaaccggaattaccactgagactttcttaatttcgttaaatgacacttatttctgctccgcaagaatagctctgattgcgtctgtcacacgggtcacatcactgtctttcatatccgggaagaacggcagcgaacataatgtcgcggtgttccactccgaattcggcagtgataatgacgggtaccgttcccggtaatatttctgggtatgagctgcacggaaatgcagacctgtcccgatattgaccgcttttaactgctccataaaggtatcgcgatcgatgccgcagaccgctttatccacacgaatcatcagcagatgattggcatgcagatgcgggtaatccggcacggataacaatttaaccggcagcccctccagggcttcacggtaaagctgtgccaggtgtgcgcggcgtgcgttcagttcgtccatccggctcagctgcaccaccgcaatcgcggcgtggatatctgacaggttatatttgaaccccggttcgaccacttctgcctgcggtttgcggccctgcatctgacggtcaaacgcatccacacccagcccgtggaacttaagacagcggatacgctgtgcaagttcatcgttatctgtagtaattaatccgccttccgcgcaggtgacgtttttaatcgcgtggaaagagaaaatagcggtgcctttttcgccgatccactcgtcacggtaacgggtaccaacggcatgtgcggcatcttccagcaggaaaatattgtgttcctgcgcaatagcacgtaaagcaaccaaatcacagggcgctccggcataatgaacaggaatgatgactttggtcttcggggtaatcgccgtacggacgtcatccggctgaatcatcagtgtgtcgcggtcaacatcaatcatcaccggtaccgcgccgagcagctcgatcatattgatggtggaaacccaggtctgtgaaggcgtgatcacttcatctcccgggccgacacccagtgccatcagcgcaacatgcataccggcagttgcggatgccagagcaatggcgtgtttacagccgaaacgctgacagaaatccgcttccagctgctgattttgcgggccggtggtgatccagccggaacgcagtactttttcaacagccgcgatctctgactcgccgatagctggccgggaaaacggaagaaactcaagcataaatacaacctaataagaatcggaagtgatgattatatcctgaattgattcaattgacgctcaacaccagggcttcgtttaaacaattcttaatctttacagcgactacataacaacaaatatatgtgacagcataacaaaaatcagcgccgttgttgatgccaatctgttatttgccactgtgtttcttgtattggtctgatactttttatttcagactgaaaaagttcgctcaagatatcttcagtcataattatctgagtttcaccggcggcaagtaactgaccggctttaagtaacaccaccgcatcggcatgcagataactgtggtttaaatcatgaccgctggtaataatcgttccctgctgttcacaaaaccgggctatccatttatccagcatcgcctgctgggtaatatccaggtggttacgcggctcatccagtaataagtatttcccggacaagtcatccgttgtccataattgcagaaatatcgccgctattttcacccgctgccattcaccgccggataattgcatcagcatacgcggcagtaacagctccagctgaaaatcgccgcacaactgataaataagctgtgtattttcctgcaccgccggcatatagagctgcagatactgaaacaccgtcatcaccgggacacaatcggtggtttgggtcagatacgcacggaactgtgcctgctgccgtttggggatcgattttaagtccgtaccgcggtagcggatttgcccctcataacgcacagcatccgccagtgcggccagcagagtactcttgccggagccgttcggtcccagcagatggatttgctgtccggcaaaaaattgcagggcatcacaggtaagacggcggccgatgtggatcccgctgacatcaagtaacagattattcatcagcggcgtcctccgtgatgccgggtcagcagataaataaaggccggcgcgccgatggttgcggtcaccacgccgatcggaatttcggcattggataaaatcagccgtgagcataaatccgccagcaacagactgacggcgccgaataatgcacaggcaggtaataatgtccggtgatcggtaatacccatcagccgcagcatatgcgggataatcagcccgataaagctgatagcgccggccaccgccacactcaggccgatcagcaacccgaccgcaataataaacacattgcgccagcggtgtgccgatacccccagttgctgggcattaacctcgcccagtgcaagatagttaagcaccggtgcctgccacagcagccacacagccactacggctatcgctgccagcagcggactgagccgccagtccgccccggaaaaacttcccatcatccagtacatcagctgacgtaaatccaggctggtgctgaaatacaccatccaggtcataaatgcaccgcagataaccccgagagccaccccgaccagaagcaactggctgttactcagccgccggaaatgagcaaaccagagtaaaatcagtgtcagcagtgtcgccccgatcaccgccccgccccccagcacccacagcggcggcatgcctttgaaaaacaggacgataaagacaacaaacaccccggcaccgttactcacgccgagcagccccggttccgccagcgggttttcaaaaatggcctgcatcaccgcaccggccattgccagcccggcccccaccgcaatcaccgccagcacacgcgggaaacgcagatcccagacaaataactgcgcggtttcagataaccactggtccggtaaaatccacatctcaccggcgcacagtgcaacggcgatcattatcagcaaggtaacagaaagaagaattatgcgctgtacatcccgctttttccgcgtctgtaccagcttcgtgatggggttgtgaatatgcatgagatccctgtcattaatcaagacgggagatagtatacctgagtcagaaggaggttaatgtctgacaaaccacagaaaagaaaacgacctcataagaggtcgtttcaggtcttactctttcggtgtcgatttttcgaccttggctttcagtttctgccccggacggaaagtgacaacacgacgggctgtgataggaatatcttcacccgttttagggttacggcccggacgctgattcttgtcccgcagatcaaagtttccgaaaccggataatttcacctgctcaccattctcaagagaacggcgtacctcttcaaaaaacagttctaccaggtccttcgcatcgcgtttgctcaggtccagtttttccgacagattttctgacatttcagctttagtaagcgccataggtttagtccctcaaggatgctttaaatcgctgttgcaacgcggcaacgcatttgtttacggttgctgcaatttcatcttcttcaagtgtacgctctgtatcctgtaaggtcagactgatcgccagactcttataaccctcagcaacacccttaccacagtacacgtcaaataagtttatgccaactaactgatttacgccaacttttttacattcgttcagaatgtcttgtgcagcgacgttttccggcacaacgatggcgatatcccggcggttcgcagggaagcgtgaaattgcttcagcctcaggaataatacggtttgtcagtgcgtcccagcggatttcaaagacaaccgtacggccgttgagatccagttttttctccagttccggatgaaccacaccgatataaccaatatgctcatcttccagataaatctcagcaccttgtcccggatggagggccggatttgtcgttgctttaaacgatacacgatctaatttgccagtcaattccaaaatggcttccagatcaccttttaaatcataaaaatcaacgacctgtttttccgatgaccagtgttcttcattacggttaccggcgataacgcctgccagcatggtttcctgacggatcccgaggtctgcggccgcatccggtacaaagcgcagaccggattcaaacagacggacacggctctgctgacggttctggttgtacacaacagtgcttaacaggccggtcagcaatgacagacgcatggctgacatatctgcagaaatcgggttcggcagaataatcgcgtcctgacctgggtgcagcagggtctggattttcggatcgacaaagctgtaagtaatagcttcctggaagccacggtcaaccagcagtgttttcacacgcttaagcggcagatgtgcttcgtgacgggaggtcataatcaggtcagcgcgcagcggaacatccgggatattgttgtagccgtaaatacgggccacttcttccaccagatcttcctcaatttccatgtcgaaacgccatgacggcgcagtcaccagccactgatcctgagaaattttcacatcgcagcccagacgggtcaggatatccgttacctgcgcatcatccacataatggccgatcagacggtcaagcttgttacgggtcagtgtaatcgttgccgctttcggtaaatctgcttcagaaaccacttcaatgatttcgcccggctcaccgccgcagatatccagaatcagacgggtggtacgctcagccgcgatacgctgtaactgcggatccacgccgcgctcaaagcggtgtgaagcatcggtatgcagaccatactgacgtgcacggccggtgatagccagcgggttaaagaatgcggtttccagcaggatatttttagtggtgtcagacacaccagagtgctcgccgccgaaaataccggccatacccagcgcaccacggcgatctgcaatcaccagaatgttatctgtcagtgtgacttcgttgccgtccagcagcgtcagtttctcaccctgctctgccatgcggacaatcagctcaccctcaagggtatccagatcataagcatgctgcggctgacccagctccagcaggacgtagttggtgatatccacgaccggatcgatagagcggataccgccgcggcgcagtttttccaccatccacagcggagtttttgctgtcacatcgacgtttttaatcacacgtccggtaaaacgcggacacgcctgcggcgcatcaacacggatagggaacgtgtcctgatggacagcggcgaccggggacatatccggagcctgataatccatcttattgagaaccgccacatcacgggccacaccacggatgctcaggcagtccgcacggttcggcgtgatgctgatttcaatcgcggtatcatccagcttcatatagtcgcgcagatcggtaccgactggcgcatctgccggtaattcaataataccgctgtgatcagcgctgatacccagctcagagaatgagcagagcataccttctgacggctcgccgcgcagtttggcagctttgattttaaaatcgcccggtaagaccgctccgactgtcgcaacagccacacgcagcccctgacggcagtttggtgcgccgcagacaatatcgagcaggcggtcaccgccggtattcacttttgtcacacgcagtttatcggcattcgggtgctgtccgcactcaaccacttccccgataaccacaccgttaaactgaccggcaacggcttctgtgccgtccacttccaggccggccatcgtaatctgatcagataacgcgtcgctgctgacagccgggtttacccattcgcgtaaccagagttcactgaatttcatgagagtatcccgccttatttgaattgcttgaggaaacgaaggtcattttcgaagaatgcgcgtaaatcgctcacgccgtagcgcagcatagtcaggcgctccatccccataccaaaggcgaaaccggagtaaatgtccgggtcaataccgacattgcgcagcacattcggatgtaccatcccgcagcccagcacttccagccatttgccgtttttacccattacatccacttccgctgacggttcagtgaacgggaagtaggacggacggaaacgcacctgcacttcttcttcaaagaaatgattcaggaaatcatgcagtgtgcctttaagattggtgaaactgatatcagtatccacaatcagaccttctgtctgatggaacatcggggtgtgagtctggtcgtagtcattacggtaaacacggcccggcgcaataatgcggattggcggctgtttatctttcatggtacggatctgcacgccggaggtctgcgtacgcagcagacgtttggcatcaaaccagaaggtatcgtggtcagcacgcgccggatggtgtgccggaatattcagtgcgtcaaagttatgatagtcgtcttcgatttcagggccggattcaacagaaaagcccagttcgccgaaaaaggtttcgatacgctcaatggtacgggtgaccggatgcagaccgccattttccatgcggcgtcccggcagagagacatcaatccgctctccagccagacgggcattcagcgccgcagattccagagaatctttacgggcattcagtgcggtctgaacttcctgtttggcttcgttaatcactgcacccgcagcaggacgatcttccggcggcagatcccgcagcgattgcatctgtaaggttaaatgccctttcttacccaggtattcaacacgtaccgattccagcgctgcaacatcctttgcctcttcgacggctgcttttgcctgagcaaccagttcagcgagatgtggcatgttttcctattcctctgaccctgtggtcttcaattatgacgacggtgctgccggacgtgattatctcacccgttccggcaagcccctgaaacaaaaaagcctccaaactggaggcttacggcgttacttttcgtttcttttttacgcgcaaagccccctgagttcaggcgctaaagtaaaaaaagaagcggaaagaaacgatattattcattttctcaactatttatcagttaaccggatgtattttgtcatattacgcgaaaaacatgcggatatacaatgacaaattattcattccgcagattttttctgccggatagcaaaagagggagcaagctccctcttctgtctgaacaattacgccagagcgccttttgctttttcgaccagcgcagtaaatgcggctttatcgaatacagcgatatcggctaagatcttacgatcgatttcgatggatgcctttttcagaccgttgatgaaacggctgtaagacagaccattctgacgagctgctgcgttgatacgtgcaatccacagctgacggaactgacgcttacgctgacgacggtcacggtaagcatactggccagctttgattactgcctggaaggcaacacgataaacgcgcgaacgggcaccgtagtaacctttcgcttgtttcagaatttttttgtgacgtgcgcgagcaatgacaccacgttttacacgagccatactaatctcctaaagtcgtaaactttgctaaaaaacttgcttatgcgtatggcaggcaagcgacaactaaacccagatcccctttggagaccatacctttcggacgtaaatgacgtttacgcttagttgattttttagtcaggatatgacggaggttagcatgcttacgcttgaaaccacctttggcggtttttttgaaacgcttagctgcaccacgtacagttttaatctttggcatttttatttccacttcgcattgttaaacaacgaattaatccggcgaataaaagccggggttgcccccggcatttattacttggattgccggactatttcttcttaggagcgagcaccatgatcatctggcgaccttcgatcttcgacgggaaggattcgacggaagctaattcactcagatcgtctttgatgcggttaagcacttcaataccaatctgctggtgcgccatttcacgaccacggaaccgcagtgtgattttggctttatcgccatcttcaagaaaacgaaccaggttgcgtagtttgacctgatagtcgccttcatctgtgccaggacggaatttgatttccttaacctgaataactttttgtttcttcttctgctctttagccgatttgcttttctcgtagaggaatttgccgtaatccatgatacggcaaacgggcggttcggcattagggctgatttcaactaaatcaaccccggcttcctcggctttctcaagagcttctctcaggctgacaacaccaagctgctcgccttcaagaccagttaaacgaacttcattgacacggatttccgtattgatacggttcggacgtgctgtttgaattctttttccgcctttaataccttattcctccggttgttcttcaagtctgcgactgcgaatttcttcaagcagtgcgtctttaaattcgctcacgtttatgctgccaagatcgttgccgcggcgggtacgaacagacacttcgcctgtttccatctctttatcaccgcagaccagcatatacggaacacgacgtagcgtgtgttcgcgaattttaaagccaatcttctcatttctcaagtctgcttttgcacgaattccggcatcctgcagttctttgacgactttctggacataatcggcctgagaatcagtgatgttcatcaccactacctggttaggcgctaaccatgtcgggaagaaaccggcagtttcttcagtcaggataccaatgaagcgctccatcgagcctaagatcgcgcggtgaatcatcaccggggtcacgcgttcattgttttcggcaacataagttgcccccagacgagccggcagagagaaatcgagctgcactgtaccacattgccatgcacgatccaaacaatcatacaaagtaaattcaattttcggcccgtagaaggcaccttcgcccggcagatattcgaattcgatgttgttttctttcagtgcacttgccaggtcagcttcggctttgtcccactggacatcagaaccgatgcgtttttccgggcgggtggacagtttaaccacaatctttttaaagccgaaagtggagtacatgtcatagaccatgcggatacaggaactgacttcgtccattacctgctcttctgtacagaagatatgcgcatcatcctgagtaaagccgcggacacgcatcagaccgtgcagtgcaccggaagattcgttacggtggcagctgccgaactccgccatacgcagcggcaagtcacggtaagaacgcagaccctggttgaagatctgaatgtgacccggacagttcatcggcttaatgcagtattcacggttctcagaagaagttgtgaacatgtgctctttgtagttttcccagtgtcctgttttttcccacagaacgcggtccatcataaacggacctttcacttcctggtaatcatactctttcagtttcacacggacgaacacttccagctcacggaaaattgtccagccgtcgttatgccagaacgccatacccggcgcttcttcctgcatatgatacaggtcaagctgcttaccgattttacggtggtcacgttttgcggcttcttccaggcgctgcagataagcggctaactgcttcttatcgccccacgctgtgccgtaaatacgctgcagcattttgttttcgctgtcgccgcgccagtaggcaccggccactttctgcaatttgaagttatggcagaagcgcatattcggtacgtgcggaccacggcacatatcgacatattcttcatggaaatacagtgcaggatgctcatcctgaccgatattttcgtccagaatttcaaccttgtaatcttcgccgcgggaaacaaacgtctcgcgggcctcgccccatgtgacgcgttttttcacgacgtcataatcttttttggcgagttccatcatccgctgttcgagtttctcgaggtcttcctgggtcagtgactcatcaagatcaacgtcataatagaaaccgttatcgattaccggaccaatcgccatgcgggtgttcggccataattgtttgatggcatgacctaacaggtgagcacaggagtgacggataatttccagtccttcctcgtctttggcggtgataatggctaaatttgcatcgtgttcaatcatgtcgcaggcatcgaccagcgtaccgttgacacgacccgcgatacaggctttcgccagaccggcaccgatatcattcgcaacatcaaggacagaaacaggatggttaaactggcgctgactgccgtcaggaagagtaattacaggcatttttaaatccttatctacagtggtgacccatacgtaagatcacatatagaaatctcatttatttgattttcagtacgttaccggcaatttcttgcgtacattgcaagccgggtcacacctgcggatcataatctgccgggcgcccttgccggaactcaaaatccatactagcacagcaaataaggattaatagatttatgtgaccaggtatctgaaaaagtgtgccgtgtcacaaagaatgcaggaattatgaacatttcctttttaaaacagtgcctgcggcggattttaaatcatttttttgtactgtcagaatccgccgcaggccgttttcagggaagaaccagattatcttcaggtaatgaatcaaatgatttcagttcatttttaaaattcaccacactcttttggccggcacattgcgtatcccgcaaccagtcacaatgattatccagcctagcctcttttatgcccatccactgactcagcagcggcaacatcgataatccgctgcggaaatgtgttatacggttttgtgactgtgcatcaaacgcagtaataaagaacggcacctgaaaattttgtttcatgctgtcgccgtgtgtcagattggtattctccgtgcccttatccgtaaacagcagaccgtggtcagagaagtaagccattgtccagcgctgatgctcctgccctgccatcacggcaatatcggacagtaatttatcggtattctcaatacttttgatatagcaggaaatattacgggaaccgataaatttatcgaaattttcagtcagtcttccgcagggttgcggatgagaaccgattaaatgcaccacaatcagttttttaccgttcttctctgccagcgcatcgcggacgaacggcagcagcatttcatccggcccgcctttatccgaacggttcggggcgagaaaatgataaaaaccggcttttttccccataattcccaccggagaatcataaatgcctttcatatgctgatttgaaatccagtatgtatgaaagccggctttattcgccagtgcgacaagattatcactcaggtttgtcacattcccttcacggacagcaagtgcatttgtcagagagagtgtggtggagccggacgcagaaatatagttatcgaaaaacaagccgttgcggctgctcatccacggtgtattcgggtgtaattcaaaaccgaatgcatgcataaaatctttgcggacactttcaccgatgacaagaatataggtgtcataaccagtctctgtgacttgtggatcccagtgatcactggtttcaataaccttggcataacgcagattatctttgcggatttgcacatagctttcataactgtcacggaaaaaacgaatttccggtaaaccggacttaaataccgagacaaatccttccgattttccctgaatataatcttttgaggatgaccagaatgcggtaataaaaaagacggtaaacagtacaattcgctgatgacgttttttcagcggcttcatcagcagtgcacaacctgcagataccagcagcccggcaagatacagataggttttaaaaggcagcccggcaatatattccagtgattcaccgttatccgtatacatcagtgaaccaaccgcattcacatcgggataaccgtaattgatccccaccgccccgtaaataaggcccaaaagtaaatatatcgtcagcagcagaacatacagcacccggctgaatgacaggcaaaatgtaaacagtgctgccgcactgagaacataaataaacttatattcataaccaaaacttaaatgcagaaccgacagaaacagaaaaagtccggctgtcgcaataaaaatccgtaacatacgtgttgtcatcatacccggcaattttaattatcagtacagagaaagtcccgcattataacgggactttcctccggggacgaccgctttgtaacaatcacagccctcaattattcacaccacagaactaccaggtaaaacattgatacaatttatcattgttaattcaccaattgtaaaatgttgtccgttatactccgtccgtagtagagataagtgaacttttggtatttctcttgccctgatcctgaatcagggctttttttttcattttttccgcacaacacgcaattcctcacactcccccattcttttcttcattattaatgatgcaggtcgtatgctttttatacacaggaaacgggcgtgccatgtaaaaaggtcagacggattttttgcagcggggaaattcagcgggacaatgtccgctgcagatccacactgcggcgcagtatctgcaacggagaaagagttcaggaagggaaaatcagagagtcagtcggccatcgccagcgcgcggtacgcgtttttcactttccacagataacggggagcctgtgatgcagggtgtttgctctgcacatgctcataaaactcatcggctgacagcgcgttaattttttcaatcgccagtgcccggttgttatcaaacgtacgcagcaatgcgccggcgccgttaacataagagacaatcgttgcgtaattgagggtttgcgggtcggtaataccggccagatgctggtcacggataatccggatgtaggtggtaccgatgtcgatattggtttgcggatccagcagttcacgggtgctcggttcgccgttgcggcctttcacacgataggcatcgcgtccggcggttgaggctttaatctgcatcagacccacagcattggatttgctgatcacatccggccggtaagaggattccacctcaataatggcgcggatcaatgtttcatcaacttcataacggttggatgcctggcggataaactgatcaaacggagtggccggatagacaccactgccctttaccggataggcggaataatcaccgatgccggacgatggcgccgttatccagccgccggaaccggtacgggactgtttgctgcttcctgagcagcccgccaacaataatgctaatgcaatcacactaacggtttttttcactctgttaccctttatccggcattctgacgaagctaagaatactgaaaacacacataaaccaaaaggagtttacttaacttttacattttatgtgattcatagcatagtgtgaatcgatcgtactgaatgttataaagatattacggaagtgcttgacaacaataaatgatattgataatcattatcaataacgatatccttagtgattgtcacactttaaccaggcaggctgataaaatgaacaaaaaacaaaatacgttttcccttccgtccctgacacagatattccgccatgctgtgctgctgcttaccctgtgcgcggtcggcgggtatgccgctgcggcggagaaaaaatttaaggtcgtaaccaccttcactattattcaggatatggcgcagaatgtggccggtgatgccgctgttgtggaatccatcaccaaacccggtgccgaaatccatgactaccagccaaccccgaaagacattatgcgggcgcaggatgcggatcttatcctgtggaacggcctgaatctggagcgctggtttgagcgcttctttgaaaatttacaggatgtcccggcggttgtcattaccgaaggtattacccctaattccatccgtggcggcgcctataacggtaacccgaacccgcatgcctggatgtccccgaccaatgccctgatgtacatcgaaaatatccgggctgcgctggtaaaacatgacccggcgaatgcggaaacctacaataaaaatgcggctgagtatgccgcgaagataaaagcacttgatgccccgctccgtgcccgtctggccaatatcccggaaaatcagcgctggctggcgaccagtgaaggcgcattcagttatctggccaatgactacggttttcaggaagtatacctgtggccgattaacgcagaagagcaaggtacaccgcaacaggtccgccacatgattgataccgtccgcgaatataaaattccggttgtattcagcgaaagcaccatttccgacaaaccggctaaacaggtcgccaaagaaaccggtgcagagtacggcggcgtactgtatgtggactccctgtctgccgctgacggccctgttccgacctatattgatctgctcaataccactgtagatactatcgccaaaggatttcatcaatgagtgatcaattcagcaaaccacagctggttgtcgataacgccactgtcacttataacaacggccataccgcgatttttgatgccagtttcagcatagagggcggctctatctgcgccctcgtcggtattaacggcagcggtaaatccaccctgtttaaaactattatggggctggtcacaccgacacagggccgggtgacactgaatgatgaaccggtgcgtgctgcgctgaaaaagaatgtgattgcctatgtcccgcagacagaagaagtggactggaactttcctgttctggtctctgatgtggtgatgatgggccgttacggaaaaatgggttttctgcgcattcccggtaaagaagacaaaaaagctgtcgccgatgcactggaacgtgtcggtcttaccgggctgggtcaccgccagataggcgagctttccggcggccagaaaaaacgtgtgtttctggcccgcgcgctggcacaaaacggtaaagtattgctgctggatgagccgtttaccggcgtggatgtcaaaacagagaatgccattatcgatttactgcgctcactgcgcgaagaggggcacctggtgctggtctccacccacaacctcggcagtgtgccggagttttgtgaccatgtgatcctgataaaccgtactgtactcgacagcggcccgaccgccaccacgtttacccagaaaaacctggaaagaaccttcggcggagtgctgcgtcatatcaatctgtccgggccggatctgcatgacgacgatgacccgcgttcactgaccgttattaccgatgacgaacgcgccgctgtcttctacggccatcaggataatctgacggtgaagaccggcagtaaggaagagcagccatgacagagctgttacttcagccgtttgaatacaactatatggtgaaagccatctgggtgagcggtattgtgggcgcggtgtgtgcctttctgtccgcttacctgatgctcaagggctggtcactgatgggagatgccctctcccactctgtggttcccggtgtggcgggggcttacgctctcggtttcccctactctgtcggtgcgttcttcaccgggatgctcgctgccctttccatgacctttgtccggcatctgacccgcctgcgggaagatgcggtgatcgggtttatattttccaccttctttgccgccggtctgctgatcgtttccctgaacccgacctctgtgaatgtacagaccattattatggggaatatcctcgggattgccgatgaggacatgctgcaggtggaaattattattgcggtttctttcctcgtactgatgttcatctggaaagatctgctggtggttttctttgatgaaacccatgcccgctctatcggcctgaacccgctggcactgaaaattattttctttaccctgctcagtgcctgtactgtcgcggcactccagacagtcggggcgattctggtgattgcgatggtaattaccccgggagccaccgcctatctgttaaccgatcagtttaaaaaattactgattatcgccgtcgttttaggagcggtcaccagcagtgccggtgcctacatcagttattttctgaacggcgcgaccggcggcatgattgtgaccttacagactattgttttcatgattgccttcttcttcgcaccaaaacacggcatgctctccgcccgccgccgtgcccgtcgtgaatcagcaaaactgcgtcaggaggcaaactcatgagtgattttctgacctctctgtttattgacccgtttgcctttccgtttatgcagcgggccatgtttgccgctattctgaccggcgcggtctgtgccgttctctcctgcttcctggtgctaaagggctggtcgctgatgggggatgcaatttcccatgcggtactgccgggtattgtgctggccttcgtgatgggcattccgctgattatcggtgcgtttgtatcagggcttttctgtgcttttgccaccggttaccttaaagaacacagccggatcaaagaagataccgtgatggggattgtgttctccggtatgtttgccctcggtctggtactgtttacccgcattgataccgaacaacacctgacccacattctgtttggtaacatcctcgggatcacgcaggctgaactgcgtcagaccctgattatcgcggggctgaccatggtggtactgatggtgaaatacaaagatttcatgctgtactgctttgatcccaaccaggcacgggttatcggactgccggtccgcatgctgcactacgggctgttatcactgctggcactgaccatcgtcgcctctctccaggcggtcgggatcattctggtaatcgctatgcttatttctccgggtatcatcgccttcctgctgtgccgcagcttcggcaaaatgatcctggtggcgattctggtctctgtcagctccagctatatcggcactgtcgtcagcttccatatcgacggcgccaccggtgcctgtattgtcctggttcaggcactctattttgtgctggcactgatttataaccagctgcggttatccgctctcaaacgccgcagacaggttgcctgaccttctgttcacgggggatattctgtcaccgggatatcccccgcttccggactcttccgaaacagccatccgtttttgtccttttctgtatttccctgctcttactgtgtaatttgtgtgagatgtccgcttttttcttttattttccggcggtaagatagactgactgatagacggcttagtgaggtggctcatgtggcaggcagcaggacgtatactcagtgaacatttcggcgaacactcgttctctgacaagaaacaactcgatggcggtgaaatccaccgttcccggagtgcccgttacggcgatcatccggtttttatcaaatataaccggcgtgacatgttgcaggtattcaaaaccgaggcggagcagcttgatgctctcagccgcagccgtacactgacaacccccgccgtttatggtgtcgggtcgacaaaagagttcagcttcctgattatggaatatctgccgctgaagccttttgattcccattccgcctatatgttcgggcagcagctggcgcgtctgcaccagtggcatgaacagccccgttacggtttcgatgaagataacctgctgggtaccaatccccagccgaatgcctgggataaaaaatgggcttctttctttgctgaaaaacggattggctggcagttacagctggcgaaagaaaaaggtatcatcttcggcgatattgacagcattatccggcgtgtacagcaaaagctgtctgaccaccagccgcagccatccctgctccacggcgatctgtggccgtcaaactgtgcggcggtggctgacggcggaacagtcgcgtttgacccggcgtgttactggggtgatcgtgagtgtgatctggcgatgctctcttttttccctgagctgccgatgcaaatcctcgacggctatcagcaggtctggccgctggaaagtggtttcttagagcgccagccgctctatcagctctattatcagcttcaccgcagccatttatttggcgatcgttattatcagagtgcgcagacgattattgacgatattctcgccggttaatccctgtcttacagacaaaaaaataccccgtcagagactctgcggggtattttttattcaggctgttttgcttaccagttaaggaacttaattaaaaaccacgcaattgcgccgataaataccggcagcacatacagcacaaaaatttgccggaaaatagtgtgattcggaatacgtattttggcgattaaatccgccggtgtttttccgctctctctggcattttcaataatggcctgatcttcaatattctcgcggataaattttacctgccgggacatacggataccggatgcactcagcgccagccccacaaacatcaggatataaatcagtaaaaaactcagattatgaccttcaaaaccgagtaatttatccggtacaggggagttattccagaatgtgttcaggaacggtgtattcacacggatcatttccgtcaccacattgataaaatccccgataacggcattaattttatcactgccggtactctgctgatgagccagtttcagtaacgaaacaatggttgagatcagggccggaataaaaaccacccagcctgccacccgtttaaatacagcaacccagcgtgcctgttgcagcgtcatgcgctttcctcatttaattttttccctgtaatcatagcgcagaaatcaggagaagatcattatcattattccggacttttttaccccgtaaattattaagtcacttaatgaactctctgccccggcttgttacaatcagagaatgttttaattcattgcaggatctcaggagcatacactatgtcccacaccttaccggtacaggccgctgtttttgatatggatggtttactgattgactccgagccattctggcttcagagcgaaaatcaggttttcagcagcatcggcctggatatgtcactgcgggataagctgcccgatttgctgggtctgcgtatcgaccaggtcgtggagctgtggtatcaggtttcgccgtggcagactccctctaaagaagaggtcattcagcggattattgattccacaattgccatggtggaaaaagagcgtccgcttctgcccggtgtggaacatgcgctctccctgtgtcagtcacagggactgaaaatcgccctggcttccgcctcgccgctctatatgctggaatctgtgctggagatgtttaatatccgccattattttgatgcggtggtgtctgccggtgatctgccctacagcaagccgcatccgcaggtttatctgaatgccgctgaagcactgggtgttccgccggtgcagtgcgtggcgctggaagattccgttaacggtatgattgcctgtaaagccgcccgcatgcgctccattgtggttccgtccgctgaaatggccgccgacccgcgctggtcactggcagattaccgcctgtcatcgctcagcgaactgactgcggctatggtccgctgattatttttgtggcgggaaatatcccgccctgctccgttagtgaaatattccggagttattcattaataaataagcctttttctttcttaccctctggccgggcgtcataaaagactttatactgtaacactgtataaataaacacctgagtatttacccggtatcatgacagctgagggtcacctgcttttctctgtcgcttctgtagtgatggttcatcagcttcagatttcgcctgatatcagtcagggggactggctgcacctgatccccggcgccctcgccggtgctctgctgccggatatcgatcatcctaaatccatgctgggtcagtgggttcgctttatttcagtgccaatctcccgcctgtgcggccaccggggtttcacccacagtctgctggcaattctgaccggcgttattctgttccgcacacaactgccggtcagctggtctgttccggcggatttttatcaggctgtgattgtcgggtatctcagccacctggccggggatatgctgacgaccgccgggatcccgctgttatggccggtacgctggcgtttctgcatcccgctgctgggcagcaaagccaataaacgggcggaacgcagtgtggcgctggttgtactggtggcctcgttctatctgcctgctcactgggaggtctggtgggatcatgtccgggaactgatactggctcagatatcggccaggctataaataatccgttttatataaccatcagctatagaaaaacatccgtttaatgacgattcaggctaaatcaaccactgtgatctacaatatagctataaataatgcagattaattataagtactgcagaaaactcctgttaatctataacgcatcctttacagttttagcatctgcataactgtatgcgatttagtcaacacactataacaacataccaacaggtatcggagaccgggatgaactttccattaatcagcaatctcgccatattcgttattctgctgctggtgctgatgaagctcagcagtaataaggactggagtctgtccaaaaaggtactcaccggtctggtgatcggtgttctgttcggcctcgggctgaatgcattctacggtacggagcatgacgcagtaaaacaggcgctgccgtggtttgatatcgtcggtaacggctatgtgaagctgttacagatggtgattatgccgctggtcttcgcgtctattctcagcgcggttgcccgtctgcatcaggcatcatcgctgggtaaaatcagcgtgctgacgatcggcaccctgctgatcaccacagcaattgccgccttaatcggtattctgatcaccctcgctttcggcttaaccgcagatggtctgattcagggtgtgaaagaaaccgcacgcctgacccagctggaatcccagtatgcaggcaaagtgtctgacctgaccgtgccgcagctgatcctgtcctttattccgaaaaacccgtttgctgacctgaccggtgctaacccgacctccatcatcagcgtggtgatttttgccgcctttatgggtgtggctgcacttcagctgattaaagacaacgaagagcgcggtgccaaagtgctcagcgcgattgatatcctgcaggcgtgggtgatgaaactggtgcgtctggtgatgcgctttaccccgtacggcgtatttgctctgatgaccaaagtggttgccggttcaaacattcaggacatcattaaattagggactttcgtcgttgcctcttatattgcgatcctgctgatgtttgtggttcacggtctgattgtcggcgctgccggtatcaatccgctgcgtttcttccgtaaaatcgcgccggtgctgactttcgcctttaccagccgttcaagtgcagccagtattccgctgagcgtggaagcacaaacccgccgtatcggtattcctgactctatcgccgggttcgcggcttccttcggtaccaccatcggccagaacggttgtgcggggatttacccggccatgctggcggtgatggttgccccgaccatgggtatcaacccgtttgacccgctgtggattgccacactcgtcggtatcgtcaccgtcagttcagccggtgttgccggtgtcggcggcggtgccaccttcgcggcactgattgttctgcctgcaatgggtctgccggtcactctggtcgcgctgctgatctctgtcgagccgctgattgatatgggccgtaccgccctgaacgtcagtggttccatgaccgccgggacagtcaccagccagatcctgggccagacagacaaaaccctgtttaataacgataatgacgaagatttacagcagggataatattccgccgctgattatcgtcagataacaaaaagcccgtattcaggatatgaatacgggctttttattgatatcaccatggttcctgcagacttcccccgcgtcacaccgccaggttaatcatcggatccgcctgtcacgttatgttttcggatgccaccttcggcattattactgctccgcagacaggcataaaaaaggccgtaacgctgggcgtaacggcctttttatcagtatgtagtgattaattcagaaactcaccgctgcgcagtgcttcaatacgcttatccagcggcgggtgtgataaaaacagttcgctgaatgatttattgcggccgttgatgcaaaacgccatcatgctgccctcttcctgcggttcgtaactggttttcaggcgttgcagtgcggcgatcatcttctcgcggcccaccagttttgcagagcccgcatccgcatagaattcacggcggcgtgagaaccacatggtgataatgctggccagaataccgaacacaatttccagtaccatcgataccgcgaaataaatcatcgggttgccctggctgcctgagttttcgtcattgttgtttgacataaaacctgccgccagttgtgccagaatacgggaaataaagataacaaaggtgtttaccacgccctgtaacagcgtcatggtcaccatgtcaccattcgcgatatggctgatttcatgggcgataaccgcctccgcctcatcgcggctcatgttttccagtaacccggagctgaccgccaccagtgacgcatcacggcgtgcgccggttgcaaaggcgttaatatccggcgcgtggtagatcgccacttccggcatgccgataccggcctgctgtgcctgacggcgtaccgtctccaccagccagcgctccgtttgagtggacggattagtgatcacctgcccgccgacagagcgcagtgccatccattttgacatcagcagagacacaaatgcgccgccgaagccaaataaccctgccataatcatcagtccggtcacactttgactctgaacgccggtcagcgacagaataatgccgaagacaaccattacggccaggtttgtgagtaaaaataatgcaattcgcatcatatcagtatgatcctttaaatagtgtgcccatcatatgcctcagaaaataggggcattttgccatatttcaaggctttttaaccgaataactttaattattaaacaactttacacttaattttaataaagtgaccttttgctgttttgtgcggtttggtttgctgtgcagataatcagcgttttttattaaaaaaacactttactttttaaatgggaaaaattatcattctcgttgtcggtacctgagtaaattactaaggtattggcaaacgacattgctcacattgcttccagtatttcgaagtttctcagccagccatcgcgctggcttttttttatccgtcagcgggcataaaactccaccggcagattatccgggtcaaaacagaagaaaaatgacttgccggtaaatccatccgtgcggatgctgtcacaacggacaccgcattgtttcaggtgtgtttcccatgcggtcagatcctgcactgcaaatgccagatggcgcagaccacaggcttccggctgtgatacccgcgccggacttgccggaaaggtaaaaagctccagcagatactctccgttcagtgccaaatccaccttgtgagaatcccgttccgcacggtagtgttcactgagcacggttaatcccagcacatcacaataaaacgccagactggccgtgaggtcagaagcaatcacggcaatatgatccactttttcaatcttcagcatatctttcctgtacaacgccccgttgccggggcgtatatcacctttatttactgctttcttttacagaggctgagtctgcgcttccaccgctgccagtgccaccatgttgacgatacgcctcacagaggagatagacgtcagaatatgcaccggcttgttaatccccatcagcacaggaccgaccgtcaccccttccgaggtagtcacacgcagcaggttataactgatacgggctgcttccccgttcggcataatcagcaggtttgccgcacctttcagcgggctgtccggcatcagatcacggcggatagcttccaccagcgccgcatcgccatgcatttccccgtcaatttccagtgacggttcccgttcacggatcagcgccagggtatcacgcattttctctgcggacggcgacggacacgagccgaagctggagcgggataacagcgccactttcggctcgataccgaaccggcgcaccgctgcggcggccatcagggtgatctccgccagttgttcggcagtcggctcatcatgcacataggtatcggcgataaaagtgttaccggtcggcagactgagcgcattcattgcccccgccgtgtgcacgccttcgtggaaaccaaacacattttccacaatccggtagtgatcgtgataatcgccgaccaccccgcagatcataccgtccgcctcaccacggtgcaccatgatggcaccgatactggtcgggttagtgataatggcacggcgggcctgttcctgagtcacgcccttgcgcttcatcagctgataatattcctgccagtattcagcaaaacgcgggtcactttcattgttaacgatttcaaaatcctgatccggcacaatctgcagtcccagctttttgattcgcatttcaatcacatccgggcggccaatcaggatcggatacgccagccccatgctgaccagttcctgtgtcgcatgcagcatgcgcggctcttccccttcggccagcacgatacgtttgcgatctttacgtgccatggagaaaatcggcttcataaacagggtggttttgtagacaaactcattgaggtgttccagatagacactgaagtcctcaatcgggcgcgtcgccacaccggtttccatcgccgcttttgccacagccggggcgattttcaggataagacgcggatcaaacggtttcgggataatatattcacggccgaaagataattcctgaccaccgtaagcggaggcaacctgctcgctctgctccgccagcgccagatcggcaatcgctttcacacaggccagtttcatctcttcattaatcgctgttgcgccgacatccagcgcaccacggaaaataaacgggaagcaaagcacgttattgacctggttcggataatccgagcgcccggtacagatgatggcatccggacggacggccagtgccagcggcggcagaatttccggttccgggttagccagtgccagaatcagcgggtcacgcgccatacctttgaccatctccggtgtcagcacgcccgggccggaacagccgaggaaaatatccgcgcccggcatcgcatccgccagtgtccgcataccgttatcatcaatagcatacgccgctttggtttccgccatattggcttcacggcctttgtagataacccctttcgagtcacagacaataatattgtcgcgtttcaggcccagcaacaccatcaggttcatacaggcaacagaggcagctcccgcaccggagaccaccagccggacatcaccgatcgctttattgacgatacgcagtccgttgagtacagctgcagtactgataatcgcggtaccgtgctggtcatcatggaagaccgggattttcatgcgttcgcgcagtttcttttcaatatagaaacattccggtgctttgatatcttccaggttgatgccgccgaatgtcggctccagagaggcaataatatccaccagtttgtccgggtcggtctcattgacttcaatatcaaagacatccacaccggagaattttttaaataaaaccccttttccttccatcaccggcttaccggccagcgccccgatattaccgaggccgagcaccgccgtaccgttggagattaccgcgaccaggttgcctttggcggtatatttataagctgccagcgggtcatccgcgatttcgaggcagggagccgcaacccccggcgaataggccagagccagatcacgctgggtggtcagcggtttggtcggggtgacagtaattttaccgggagagggaaactgatgaaactcaagggcactttgttttaattgttcgtccatttcaggatcctttacaggcgttaataacagggtcagggcggaccggcggtgtaagctctgccgccggtcacgttattcagcgctacataatcagtatactgataaatggcggaatagtgaaaaaagtgtaatattcatgtagttaatgtgctgaacctgttgaaaaaaacaacatatctcttattggttatctgataatagcggccttctccggctataccgccaattatatcttcctgtcttaaaccctgaacctcatccctataatatgcttcatgttattagggacattattatttttaaatactttgttatttgcacatataacacttttgcgtaaaaattaattgtcctggcgattatggtatattttgtatttcaataattaatatatcaattaaatcgttttaattaatattatctcataccgtacacccggcaagggagaactctatgcctcatcacactattatggttattgatgaccatccgttgttacgctatggttttaaaatgcttttacaaccggattatacgttaaccatcatgccggaatttactgacaacaatggtctgttcagccatatccatcagcatacccccagaatgattatattggatatcaatgtccgtgctttttccggtattgattttattaaaaaattacgccacaaaaaaatatccagttatatcctggtgttttcacaatcacgggaacggaatgatatatacgctgctattgatgccggagctgatggttatttattaaaaaattgcgatgttgattatttattaagtcagattgaaaatgcgtttaaaggaaaaaagattttcagtgaggcgatttataaaattttgcaggaacgtgaacactatcacgatccggtcagttacctgacacaacgggaagccgatgttctcaaagaactggcctgcgggatgaaaaataaggaaattgcacgggcgctgtttatttcggaagagacagtgaaagttcatatccgcaatatactgaaaaagctgaatgtctccacacggctcgccgccagcctgctctatctgaaataccggctgccccgctgagagggatccccgggatggctgtccgggggttactcgctttcttcgtcgatactcgccggtgtcgggtaattgagcagttccagggtaccgtccggattttcgcggacatccacctggatcacctctttattcatcccccggaggatcgtatccacttcactgtaggcgtaacggatgtttttatcacgcgcccagtccggcataccggtcacaccatagtaaaagtacacggtactgatgccgttgccctggggctctatcgccttgattttactgatacgcagtgcgccgtaacaaaaatcctcatgcacctgccaggcgtctttacctttgtccgtcagctgatattccacgccggacgattcaatagtcgcactgataaaaccgacggaagccagcgcattcagccgtgaaatcatccatggctctgactgacttgagctgaactgcggccatttgtgttcatccaggcacagttcgctgttttccgtaaatttgagctgaagttcattcagatacacgtccgtttgtcccgcgagggtaaagctggcaaataacagcgtgcttccggctaagtactctttcatcgatcctgtctcaacatcttccggatgtttttgtcatggttatggcgtaatgctaccccacttttttgcatttatcgaatactctctgcacgtaagattctggataactgcatcaaattcccgcattatgctatttttcgtgttcacgacaaaggataaaagatgaaaaatacaacctccgtctgccggattttcgggattaaaaactgcgacacgatgaaaaaagcccgggcatggctggatgctcatcagatagcgtatgagtttcatgattaccggcaggatggcgcggatacagaactgctcagtgaatttgcccgtcatattgactggacactgctgctcaacaaacgcggcaccacctggcgtcagttagataagacagaacaggatgcggtgacagatgcacagtccgccatccgtctgatgtcagaaaaaccggcgctgatcaaacgcccggtgctggtctctgcggacggccgttatcaccttggttttaaagctgatgattatcagcagttcttcagtcttcctgcctgatacagaggaaacaccatgcattgtcctgtaacagaactggcaaaacagcttatcagccgggaatcggtcagcccggatgataaaggctgccaggcactgatggctgaacgcctgattgccgccgggtttaccgtcgaacatatgcctttcggcgacacacagaatttctgggcataccggggcggcagcggcacaacactggcctttgccggtcacaccgatgtggtccccccgggcgacctcagccactggcgcaccccgccgtttgaaccggcactgattgacggcatgctgtacgggcgcggtgctgccgatatgaaaggttcgctggcagccatgattgttgctgccgagcgttttactgaacgttatccggactatccgggacgccttgcttttcttatcacctcagatgaagaagcgtcagccgtcaacggcaccgtgaaagtggtggaaacgctgatggcgcgccatgaaaaggtggaatattgcctggtcggtgagccgtcaagccagtcccaattaggggatatgattaaaaacggccgccggggttccgttaccgcaaacctgacgattcacggcacccagggccatgtcgcctatccgcatctggctgataacccggttcaccgcgccgcgccgtttatacaggagctggtggctgaacactgggacaacggcaatcagtttttcccaccgaccagcatgcagatagccaatatccgtgccggtaccggcagtaataacatcattcccggtgatctgtttattcagttcaatttccgcttcagcaccgaatccacagctgaatcactgaaagccaggattgccgcgctgctggaaaaacatcagctgaagcacactattcactggtcactgtccggccacccgttcctgaccccggaaggcccgctgaccggtgcggtctgccgtgccatcggtcagtactgtaatctgacaccggagctctccaccagcggcggaacctctgacggacgctttattgcgcggatgggtacacaggttgtggagctgggtccggtcaacgccaccattcataaagtgaatgaatgcgtcagcgccgctgatttgcagcaactcagccgtatctatcaacggattatggagcagatcctgctatgatgacctttgaaatactgaccgggcagacccgtgatcatgtcattaattttgccggtaatcatcacctgcaatttaatgccaccaaagcgtttctcgccatgcagaaagcggcggcaaccgccggatttaaactgatgcctgccagctccttccgcgatttttcccgtcagcagattatctggaatgaaaaatttgccgggatccgcacggtaaatgatgcagaaaaccgcccgctggatgtctccgggctgtcagaagcggagcgctgtcaggcgatcctgcgctggtctgccattccgggtgccagccgtcatcactggggaacagaggtcgattattacgatccgttccgtctgcctgctgatattgctcttcagcttgagccccgggaatacgaggaaggcggctattttgccgccctttccgcctggctggcggataatatggcacagtttgatttttatctgccgttcacacagcgtcagaccggtggtgtggcttatgaaccgtggcatatcagctactggccgctctcttatgaagcggagcagctttacaccccggaaacgcttgaaagagtactgaaaacacaggacatcgccggtaaaacatggttactggctaatcttgacgcaatttatcagcaatatgtcacattaccggaaagcgattaatccggtgatttctcctctgacgccggggtattctccggcgtcatttcatctgtttccggcaggcgcagcataaagatcagcagccagaccagaatacacagcagtaacagccggatataaatcagtttcaccagccaaagcgacaccgcaaacgtcagcaggatcacgattactgcacgccgttttgccttgcgcggcaggcctttgtgtgtctgccagtggcggatatacccgccgaaccaggaacggtacagcagccagtgatggaaccggggagatgaacgggagaaacaccacgcagccagcagcaggaacggcgtcgtcggcaataccggcagcacaaccccgagggttgccagtatgacggcaatccagcctgataacagcagcagtatgcgggtgaacggcttcacgtcctgagtctccggtaatgagaatgcaactcaatgttatcgttgtgtaacaccttattcaaccggcttgtgatcacaaatgataatccgctgacaaaacggctctctgttccgcacagagagccgctcaggttgctttcagtattattaccggcagaaaatcaaatgattgatactgatatcacatcagtggcggtactgacggccggatcggcacaacgagcactgtcggccccttgcgctgtaatgccgctttgcaggccgcaattacctcagcctctgtttctgcccggactgcggtgcagccgtaaccggtggcaagagccgcaatatccagccccggaatatccagacccggcacccccggcgtatcttccagcactgcgaaagatttcagaatgccgtactgcctgttttccggaatgacaaacaggatcggtaactgatgctgtgcggcagtccataatccctgcacagagtactgcatggagccgtcaccgataatcgccgccaccggccggttacgcccgctgtcccgttcaccgagggcaatcccggcgctggccggtaatgtccagccgagtgaaccgctggcaaaggtgtaaaatgagtccggtttatccaccggccaggcagcatgcagttcgccgaggttagagggggattcctcggtcagaatcgtttcttccggcatcgcacttctgaccgcgcggaacagctgtgaagcactcagtagcccgtctgacgcagcttccggcgcggtgggatgcggcgccataccgtgcggttgtttactgacggcagttgccagtgccggtcgtgcactcaccagctcagttaactgctcaaccgccagtaccgcatcacataacaggctgtctccgaccggcgcccgaccggcttcctgcggatcatccgtgatatgcagcaaccggagtcccggcgggatatagtcaccggccacatacgggtaatagcggaagaccggcgcaccgatgatcagcgccacatcatgcccggcgagtttgtccgagagtggtttcatggcaaacggcaggccgcctgcatacagcggatgagattccgggaacggcgggcgctcggaagctggtgccgaatacaccgggatattcagtttttccgccagccggatccctgcctcccagccctccccccgcgcaagggatgagccgtaaatcagtaccggatttttcgcccctgacacactctgcgcaaactcccgcatccgcaccgggtcggcactgatacggtgagacacgctgcggacaaccgccgcatccgcttcagccggtttatcccagtcatccagcgggatcgataaaaataccgggcctgccggcggttgcagtgccatcgcatacgcccgcataaaggccgccggaacatcttccgccctcaccggctgataactccatttcacccacggctccggcagtgtttccggcttaatattggtcagccacggctctatcagcagcatgtcgcgggtctggttaccggcggtaataatcagcggcgtgcggttcatatacgcggtaagaatattactcatcgcgttactcagcccggcggaggtatgcacattgaccagtgcaacattacgggtggattgcgcataaccatccgcagcggcgaccgcagacgattcatgcagtgtctggatataacggaaatctgccggaaagtttttcaggaaagtttcttctgtcgagccgggattaccaaaaacagtcgtgatattcagttgccggagtaattcaaatgtcacctgacggattgtttttcccatcgtaatgctcctgtgaaatcattattctgctgataccggatataccggcgaatggaaaaagcatgctgaccactttatctgtctgacgataattttcacttaaataacaatgataaacatcgtaaatataaattaacagaacagtgaaaaattccgatattccggactctattacagcggaaaataaagatcaaactgcggctttatggccctgttcctgattatcagaccggcagaattattatttctgatataaagcagaaagatagaggtaagaccagataaccccatcataaaaggtcagtgtaatacccctgacggggccggttgagagtaaacaacgcgataacatgctggcagtttgttagtccgttacagttccgtttaactcagtgctgttattgtctgccgcgtggtaccaattggttattttgctttttttcagctctccgcggatgcagagagctttttttttatttccggtatactatccgaactattcagactgtttatgtgcagaggtcatatgctgaaaatattctgctttattgccgttattcttctttcaggctgtgccggggttggtgtcggtgcatccggaggttctgaaggcgcttctgtgggaatcggtacaggtatcggcttttaacccggatgttaataaataagagcggtaacaatagtgcattagtcatacaggatgaaaaaagtcatatttaagattcaatgtattgataaataaacccatttaaaaaccacctgagcgggttggtaatatataattacctgaaatataaccaggtaaagcgtatcaccgatgtgctgaaaacataccggcaaaaactgtatgatggcattcctgaatatgcacagaaagcattaccccggtccggggtgcgggcattgttccgtagtgaaattatacgccattaatttatggaaaaggcagttggaacataactgccttagtgtccgtcagacggaaataaacataaatgtgacaggaagaaaaaagataccgccgggaatggttgctgtaatcaaaggtaataaagcaaaagcttccataaattactcctcattgttatcgctaaatatattttaatcagcatcaataaaatttcaatgtacctgttatttttcaggtatatctgcaggtaaacaacatgataaccaaaccgtgtcgcgctgcgtacggttctgacgtggcgtgcatcgctgtgctatttttatgccttgcccgatatgcggcaagggtggcgatatccgcctgaatgtcctggcatgtccccggaagatgtgattaagaaatgttattccgtgtatggcggatgtgataaccttatagcttcatctttcaggaaagaattaacgaccacaaccgtttccggatagttcgtgaaagccggggaagacacctcagttaaccggggagacaacccgttgggtaatggttttaaactcattttgaatgatagtgacttatccattctgatttattgataaataaagacaaaaaaaggtaacaacaatgcattggttagcagactactggtgggtcatcctggtgctgtttgtcggcgtgatcctgaacgccattaaagatctcaaacgcgtggatcacaaaaaatatctgcagaaccgcagggaactgccgcctcaccgtgataataacgcacagtgggatgatgaggatgactggccggataataaatctaaaaagtcctgatctcttctgctgtctgctgcgcccactgcgggcgcagtatctgcagtatcactgctgtttcctgtctcagcacactaagtaatgccttttttccgctgatatggcgagctttcagtatctctggtttaccggacagcaactgtgacaattccgctgtctgtgccgggtattccctttgcaggagtaccaatgcaggatctgccaccgcctgtggtttagcggcatacgcaaacccggccagcatccgccattcccattcattgagtgattccgcctgctccggcggtaccggtgaaaatccccatatctgagaaaaaacagtgcaatcccgggcaaactgctgttctgcgtcatccgccagtgcctgtccggcccgcgtcagcggcagcagcagcattgcggtataacatccgctgcccgcttccgggtgtgtccccattcgggcaaaacgaaagccgcaggatgtccagaacgcagccagttccggggtatagccgaaactgacggacagataatccataccgctgttttttgccgcgtcagccgcccgctgtaataactgacgtcccagcgcattgcgccggtagcctgcatgtacggcaatacggctgatacggcgtgaacgcagttgtgccgcctgcgggaaataactgtgtgccgccagcgattgtgccagcagatttccgcgcggccgccgcgtgcccgcccagacagacagtgtcagtgctgccggtaacccaccctcgtcggtcagccagagcgccgcaatcacctgctgccggtggcggaactgcgcgaaatgctgtccgggcgcatcggccagccgccgcagatccagcggggatgtccggtaatgcgctgccgtcagcaggccgtaaaacccggacaataaatccggatcatcacataacgcctgctgtgttacggactgatattcacacttccccgtctgtatgattttttccgccggctcggtgagcaacagtgccttatcgagccaggtttccgccgggtcatgctccgcccagcgtaccggctgcgtcagcgtcagtgcggtaaactgcggcagtgagtgacaaaatttcagtaaaaatccccgccctgtgccttcataaccctgaacagtggtcagcagcagcacacggggaaataccgccgtaaaacgcgcgagcagcggcaacgggatcatcgccgcttcgtcgatcaccagccagccgtatgtgctgacatccgccgtttccgccagtgtcagtaaattatccggggcgataaattccgtttgttgtgaatcatgaagatagcgctgtatcaccgtgaccgtggcttttgccggggcacataataaatgacggcccggcgattctgccaggaacagaccggccacggcggatttgccccgtcctctggccgcggtcagacagaaaatgccgctttccgcacggcggagctgtgccagtatctgctgctgcgcaggggtcggtgtgccatccggcggctgccacgcgttttgcggcggcagcagagtcatgtcaaatggcctgttttcataccggcagagatgagcgggatggataagtgtacgggcgaagtggcgcataaaatgcggcgcggggatcatctgtccgccgtcattccagcgcaggctgtcctcatccggccgggtctgccattgtgattccggcggcagcagcaggatcagccaactgcccgcctgtaatgtgccggccagcatagccagtgcttcactgtgcagcccgcgccgggcatcaaacacgccgtgacggaactcctgtcccagcaacagacgggctttctctgccactgtgccgccgggcagctgagcggaaatgatcggccagtctccgggcgccgcgtctctgatttcctgtaaccgggattcacaccagtcgtcactgccgctcagtacccacagacggcgaataccctgtatgcggagctgttctgtgcaggcgtgaaacagtgcgggtaacatgggaaccgctacatcttaccgacaagcagtgacaggatccccgccgcgatcagcggtccgaccggaacccctctgaacagtgcgacaccgataatggtacccaccagcaaaccagcaaccgtggacggctggttactcatcagtgtaacgccccggctgcccagccaggacaccagtatgccgatcactatcgccagcagggatttccagttcagaaaggagcttaaaacatcattggcactgattttaccgctggcaatcggtgccatcacaccgacggtcagaatgaggatccccagcttgaggccatatttttccacaaacgggaaatagccgttgagcggcgtgatgcgcacagccagcagaaaaagaatagccagggttaccgtcatgttattactgataagcccgagcccggctaagaccaggaggataatcagggtcgggtcaatattactcatatcagatcctgcgtgtcggggggaatgaaagccgccaatagtatgccgttatacgatgataatcaaactctgccggttttgcaggaaaaaccggcagaaaggcttatttcagtgcggaaaatgtgtcacattgcgcaatattaccgctgtcaaaaccgcgtttgaaccactcataacgctgtgcggatgttccgtgtgtgaagctgtccggaataacccgtccctgactctgtttttgcagacggtcatcgccgatggcctgcgccgcattcagagcattttccagatcaccgttttcgaggatcccggctttttccatctcatggccccagatcccggcaaaacagtcagcctgtaattccattttcactgacaggcggtttgcctctttctgactgctgcgctgctggcgctcgcgtacctgacgatcgataccgagcagatgctgaacatggtgccccacttcatgagcgaccacatagccctgcgcgaaatccccgcccgcccctaatttagtgcgcatgtcatcgtagaaagagaggtcgatatagactttctgatctgccggacaataaaacggccccatcacagcctgccctgcaccgcaaccggtcggtgttgcgccccggtacagcaccagtttcggctcgcggtactgccggttcatctgtgcgaatttttgtccccagaccgcttcggtttccgccagcatcacgccggtaaattccgcctgtttctgctcctgtgcactgttctgtgccggacgctgctgtgaggtggtctgcccgatattaaccggatcaccggtaaccaggccggtcaggtcaatgccgtaaaaaccggccacgaccacgataacgaccacaaccagtccggctttgccacgcggcagcggaatacgcggcccgcctgcggatccgcccggaattctgccccccgcactgcggcggtcttcaatattgtcgctctggcgacgcccttgccaacgcatgatgattctctgtttatcggataatagtcggataactacatagtacagagaaaatgaagtgaggaaaaatgcttctttctttcaggggagtgataaatcagcttaatgccggtgatacgcgggttctgttatcaccggccatacattcaggagatgaatgattaatccagtttcacacccagacggcgtgccacttcctcataggcttcaatcaggccgccgaggctctgacggaaacggtctttatccattttatccagagtttctttatcccacagacggctgccgtccggtgaaaattcatcgccgagcactacctgacctttatacagaccgaattccagtttgaaatccaccaggatcagaccggcgtcatcaaacagacgggataatacgtcattggcgatgtagctcaggcgcttcatttccgcaagattttcccggctgacccagccgaaggtttcgcagtaggattcattgatcatcgggtcatgtttggcgtcatttttcaggaacagatcgaagattggcggattcagcaccataccctcttccacgcccagacgtttcaccagtgaaccggcagcgcggttgcggatgacgcactcgaccggcaccatatccagttttttcaccagaatttcggtatcagataacaggcgttccatctgcgtcgggataccggcagcttccagtttacccatgataaagtggttgaatttattattgaccatgcccttgcggtcaaactgctcgatgcgctcaccatccagtgctgatgtatcattacgaaattccagaatcagcagatcgggattatccgtggtgtagaccgttttggctttcccacgatacagttcagcatgtttttgcatcttgcactctccagacaggattaataataggcgtatcgcctgacggacaatattctccctcagaacgaggcaataagcaatcgtttgcgtaagaaaagatacagacccggaaagagagtgttgtccggcagaagtgtgtttacaccataatgagggataaaccccgggctgtcagcaggtcacgggcagattgcggaaccttcagagtgagcaccacatgatccagttcctcacatgccgccacgcggtaaggtgcaatacggctgagtttgtcaccggtcacaccggccacggtcagactgctctgtcttatcagtgcccgtttgaaagcggcttcctcaaatccggtgaccgtcagaccactgtccgcatccagtgcgcatccgccgggaaaacagaggtcaatattcagataagacagctgctccagtgcctgtgccccgatgcaggtgccggaagcgcggtgcagctttccgcccagcacaatcagctcaaaatgcgggtagtcactcagtgcggctgcaataagcggactatgtgttatcacggtcagggaaaaatctttcggcatgtgctgtgccagcaacaggttctgactccccccgtccagaaagatcgtgctgtgattgcggatcaatcctgcacaaccgagcgcaattttttctttttctgcactgttctgcccgatccgctgctgaaaatccgccacatcgcccagtacactgaccgcaccgccgtacacccgtttacagagcccttcatccgccagaacctgcaaatcacggcggatggtgtgctctgatacaccaagctgatcaaccagtgtgctgcactgtacccggccgtcactgtgtaataactgtcggatcagggcttgccgttgttccggaaaagctgcataatcgagcatatatttctcctgtaaattgcataaagcatcataaacgggcatcccctgcgggtcaatcaaaaccctgtcactgctgaggtcattctgtgaacacacatcatccggatatcgcattttttcatcagttagccaaccgcgcagcacaagagacgttaccgcgttttttacccgggcatacactgtccgtcgataccaaaatcaaagaaggtgtcagttttgatccggtaacggatgcagaccggcaggctgaaatcgcactgcgggaaatgatcagcgcagcatatccgcagcacagtattttaggtgaggagttcggtctgaccggcgaaggggattatcagtggatccttgatccggtggacggcacccgcccgtttatgctcggattgccggtctggggaacactggtcggattaacctgtcgcggaacacctgttatgggaatgatgagccagccctgcaccggcgagcgtttctgggcagacggtgaacgcagctggcacagcagcccgcacgggacatatgtgatgaaaacccgcaaaaacatcaccctggccaatgccattctgcacaccaattcaccggagccgatgccccgtttcccggaaatccagctggccgatctgatggaaaaggtcttaatgacccgtttcggcggcgagtgctatgccatggcgatggtagcggcaggtaaaatcgacctgtgctttgattacgcccttcagccatatgatatcgctgcatttatcccgatcattgagcaggccggtggttgtgtgacaacccttgacggcggaccggccatacagggcggagctgttctcgccagtggttgtccgcgtctccatcagcaggtgctgactattctgaacaaaaatatttaataatcgtataatgattatgattataaattcgtattacaaaggttgttgtgaatgagtgatgtaattacagtaacaccgcccgccgtaccggcggaacgggaacagatagccacccgcgcgctcttttttgtcgccggttttgcctccgcggcctgggcagcactggtgccgtttgccaaactgaacaccggcgtgaatgacggggttctcgggttattactgctctgtctcggcggcggtgcgctggtcgccatgccgctgaccggtgtactgaccacccgtttcggctgccgccgggtgatgactgtttccgttctcctgcttagtgcagccctgccactgctggcggtcattaatcacaccgggttactggctctgacgctgattattttcggtatggggatcggcattaccgactgtgccatgaatattcaggccattattgttgagaaagcggcaccaaaaccaatgatgtccggctttcacgggttctacagtgtcggcggcattgccggtgcgggtgccatgagcggctttatgctggccgggatggacgcattacaggcggccggtgccgtaacggtgatttgccttctgctgctggctctcagttataaaggcatgctggattacgcctggccgtcagaaggccctgcatttgctgtgccgcgcggtgcggtattactgatagggattatctgcttcgccacctttctggccgaaggcagtgtgctggactggagtgcggttttcctgacagagtatcgtcatgtgccggaaagcatgggcgggttgggttttgcctgcttcgcggtgctgatgtccctcgggcggctgaccggcgacaaaattgttgcggtactcggacggccgcaggtggtgctgtggggcgccctgctggctgccggtggtcttctgctgagtgtgctgagtgacaactggcttctggcgctcaccggttacgggctgatcggcctgggatgtgccaacgtggtaccggtgatgttttccgctatcggccgccagaccagtatgccgcaggccgttgccgtcccggcggtaaccactctgggttatctcggtattctggcaggaccggcgtctgtcgggctgattgcttaccgcttcaccctgcccgctgcactgctggccgtggtcgcgctgctgttgctggtcgcgctgctgtcgcgcaaagtccggatgtaaccgatgtaaaaacaccggccgtcaggccggtgttgctgtattctccgcggcgtctttcagaatcgctttcagacgcggataacggcgtgccagccgccagcgcagccgcaaatctttggcgttatcccagatgagtgaccagatcccgcgatcaaacagttcacgcacaatctcctgtttcacctccggagattctatctcactgatggtatgcaggatccccagcccttctttggaaatctgccagtgacaggcagggatctgcttcgcgacatccgcatggcgctgattgatatcatccagcatttccaggattttcatgtaattatggactgtacgtacgcggattttgtcatccggcggcgtatgcgataccgattcggaatggatcagataatcgtaataacgttcatcaatatattccacccgcgctgcggtcatcagcagttcggttgtccacggaatatcctggtggtgcagccccggctcaaaataatagccctgctcacgcagaaaatcagtgcggtacaggttcagccaggtcacatgcaggaacttacgggagttgagtgcccgtttcagccagtccggcccggaaagaacgccggtggaacgcagacgatcaggcgggaaaatcggccgtggttcacgcccgtcttcataaacataggtaccattgcaggttgccacatccagttttccggcaagcgcaatttccagcaggcggccgtacatttgcgggtgaatcacatcatcaatgtccggaaacgtgatgtattgcccttttgccacggcaaaaccggtattccgcgccaccgagacgccctgatttacctgctccagaatagtgacagacgggaatttgtcctgccattcacgcagcacagcatccgtattatctttggaaccgtcattaacgaggatcaactcccaggcaggaagtgtttgtttcagcaggcagtcaaaaaactgaggaagaaatttttccccgttatagacggcaacaacaatgctcagtaaaggtcgtgaagagtccgaagataaatccatgtcagccctgtcaattccgggtagcctgatattcagcagacaatgcggctgaatatagcgaaaaaataattataagtatttaaatataaccggagagcctggcataaacgtggctaataatgcgatatgtaagacagagaaataagaatttatcttaaaaatgattaggttgtgtatcaatttattacaaaataataacgatataaaaaaataccggccattaacaatggccggtaccgataattatatttacgcatttatatgttgcgtgaatatattattttacagatgatttgctgaatgccgcttccagcgctttcaccatttcatcattttctttctgtgtcagcggtttccctttggcactgataaactggaggctgctgcggttatccaggtcaccgacctgtaaggtgtaatcaccttcggccactgacggatcatccatacccaggctgctccactctgcagaactcagccctttgtatgtcacttcaatattcccggtcgaacgggtgcggtcacccactttcatgccgacgctttccagcacaaccggcagacgggaccagaccacatcaaacggcgcgcggacaataatctgcggcagaccggttttatcactgccgctctgaacgtccggagccgcatactgtgacgcattggtttcctgacgtgcggcattacgcatacggtcaaggccgtccaccagctcgttgagtgtcaggttgttataacgggtaatttctgttttatctgtcaccgggttttcaccctgtttcagaccttcactggtcacaacaactgccacctgtgaaccggccggttcaattttgatgcgctggcgggactgtaacggcaggtcttcatccgcacgctgccagacaatccagtcagtgacaatcacgccaccggcttcatcacgctggctgaccggcactgagcgatcggccagaacgcggttgatctgagcccacagcgttctgttttccgctgaattctccagcagaagacggcttgcgtctcctgctgtttcagtacgggaacctgctaacaggctgacagtctgtaccggcggacggatgtccagcgccagaccggtcgcaccatcctgcttaacctgaggaatatcatactggccgctctgtaacggcaggatcatcccctgaggaacattcagcgcctgtaactgcggcgcatccaggtacgaagtatcgccgctgacctggcgcttatagttctgatcgccggagcaggctgccagtaataaaaccacggaaagaccagcgagcttcgtaacctttgatttttgcagtagtgttgccattcagattccctaaaatattatcgtatgcccgccgtcttcatggcacggccgaccgtattctgccccgcttccgtgagcggtaacagcggcagacgcagtgtctgctctgcgatcagacccagctgatgacaggcccattttaccggtgacgggcttggctcacagaataatgtgtgatgcaggtccatcagttgattattaatcacacgcgcacggtcaaaatccccgcgcagggcaagatcaaacatctgtgccatctctgccgcagccacgttggctgtcacagaaatcacacctttgccgcccaggagggtgaaatccagtgctgacgcgtcatcaccgctgagcagaatgaagttttcatcattcaccagggttttgatttcattcacacggcttaagttcccggtcgcttctttaattgccacaatattgtccagttttgccagccgggcaacagttgcaggtaacatatcacagccggtgcgcgttggcacattatacagaatttgcggtaatgcggtattctctgaaatcactttaaagtgctgatacagaccttcctgtgacggacggttgtaatacggggtaacggtcagacatgccgccacgccgctgttttcaaattgctcagtaaaccagaccgcttcgttggtcgcgttagcgccggtaccggcaataacaggaatacggccttccgcgaactccagtgtcgccagtaccacatccacatgttcctgatgtgacagtgtggcggactccccggtggttccgacagccacaatggcggacgtacctgccgcgacatggtaatccactaatttccggagccccgccttatcaacacgaccctgtgtgtccagtggtgtaaccatcgcaacaatactgccttttaaaacgtcatttatgtgtgacatgtacgaaaccctcataatcggataaatataggacaacattttaatggtacttgttcagagcgcagaaaaaaacaccctaactgtacgtttttaatgaattttgttaatacctagcggcacaccttaaaaagaagtaataatgtccgcttttttcaccggtaaaacggcggaacacatgataacgtgtctgtatccggcaggtttgatatgccgcaatcatttgattattaccgcagagcacacaacaggttattgctatcggccttatctttctttatgtttaacacattcacggtgtcatgaagaggaatgagggtttgccgcaacgcgatcagcaatatctggttatcactgcactgggacgggatcgcgcagggattgtgaatgcgattacccgtcatgccggagagtgtgactgtaatatcgaagatagccgtctggcgattttcggtgaggagttcacgtttattatgatgctgtcaggcagctggaatgccattgccatgctggaggccaccctgccggtactggcggcggaacttgacctgctgacggtcatgaaacggacacagcgcgggcatcagcctgcggccaccaccggtgtcagtgcgcaggttactgtgcctgatgcggccgggctggtggaacgctttaccaatctgtttatgagactggattacaccctggctgaactggtgtccaaaacccggccggaggatgatacagacgcagtactgctggagattcagatcaccgcgcatcacccgacaggggaaaacaacgcggtgctgcagcagcagttttaccgtctttgtgctgagttacaggccgaaggcactattaccctgatgaatcattaatgtttgtgtttattattacgtttacggagagtgtgtaatgagcccattgaacgccggtgataaggcgcccctgttcagccttcccgaccaggatggtgaatcaatcagcctggccgattatgccggtcagcgtgtgctggtgtatttttatcccaaagccatgacgccgggctgtactgtccaggcatgcggtctgcgcgacaatatggatgaactgaaacagttcaatgttgaagtgctggggatcagtacagacaaacccgaaaaactgtctcgtttcgcggaaaaagagttactgaattttaccctgctgtcagatgaagaccacgcggttgctgaagcatttggcgtctggggtgaaaaacagtttatggggaaaacctatgacggtattcaccgcatcagcttcttaatcggcgctgacggtaaaatcgagcatgtttttgataaattcaaaaccagcgaccatgatcaggttgtgcttgaatacctcaaagctcacagctgatttatttgccggaatgataaaaacactatctcccggtagtgttttttatattcctgatgtttttttaaaaaaaaatacatattctggatattagtactttgtaattaagttaatatgatattgtatctctgctgacaatgatgtcacgctattaaaagggatacttaatgaagttaaccaaaattgctaccgtattattatttttatcacctgcttatttatcggcggcgacacaagatttcacctatcgtgatggttataaaatcacgacagatcaggcatcacccgaagttaatatccggattaaggataataaaccgacacaatcaatcagcacaccaaattcaaatggtatttcacacaattactttactgaattcaatgtcggaaaaaatggcctgaatattgataattcaccatcagctcgtgtgattatcaacgaagtaaccggaaccaatatcagtcagctcgatggcactatggccattattggtaaacaagccagtctggtcattgctaacccgaatggcgttaactgtaacagctgtggtgtatctaatgttagccacctgacactattagccggaaatacttcacttgatgttactacaggaaaactaatcggttttaaaaatataacgaataatgttatcgttagtaatgtcaaaaaaaatgcgataaaaagcaacctgacattaacgggaaacagcgttgaaatcaacagctcttatgttaattcaccgcatacaacgattaatattggtgcagataatatcgatcttaaaaataatcttaactctcagatttctgatgttaaattaaccccgggggaagtagttaatagttcaggctcatattcgaattcattgatcgacagcgatactaaaatacgcggtaaaatgaccgtcaatgccaaaaatgcaacgttaacaaataacggtaatattatattatcggaggttaacttaaacttactacattctgaacttattaatgatggttatcttaaagcatcaaatattaatattaatgcaaaaaatggtagtatttctaattatcaaaagattagtacaaaaaatctgactgctgattataatggcaatttctccatttacaatactacagcaggggaaaaaccaaataatttttatgcccaaaatatgtccattaacagtcataacatcaaccatatgattgacctgaaaaataatgcatatcagggttatctgcgagataataccttatctgtcagtaatgataccggtgccacatttgcaaccggacaattcaatattgcaggaaagcatgacgccgtacacattaaaaacgatggcataatgtttaccggaatgagaacgtgtcagttaccacccataattttgatatctgaccgaatagcggtatgaatataaaagtgatgttttataaaaacatcactttttattttttgattattcctttgatactgattgtatattatcttcaacaacctcttcaggccaggaatgaatcactgctttaatcagggttgctaacgggatagcaaagaatacgccccagaatccccataatccgccgaaaataataatcgacaaaataatcaccagcggatgcaggttcaccgcctcagaatagaggatcggcaccaggatattgctgtccagcccctgcaccaccagataggcgataaacatggtccagaaatccgaatccagtccccactggaacagcccgaccagaaccaccggcaccgtcacaatcaccgcccccacatacgggataaggactgacagccccaccagcacacccagcagtaacgcataattcaggccgaccaccgcgaagacgatataagtacaaacaccgacaataatcatctcggtgactttgccgcggatatagttggaaatctgctgattcatctccacccacactttcccggccagtgagcggttacgcggcagaatacgctgaaaaccgcgcagcagctgttctttatctttcagtaaaaagaacaccatcaacggcaccagaatcagataaatggtcagcgccagtaatcccaccagtgacgccagcgacattttcaccactgaatccccgactgagagcagcttgctgcgggcattatcgaggatcatatccatcagcccgacatccatcagcgcagggaaacggttcggcagttcactggcgaactcattgaaacgactgaacatattcggcatatccagcagcaggttacgcccctgtccccagaccgtcggcgcgaggataaagatcaccagcacgctgaccccgataaacagcgtcaggatcagcataatcgccagcttgcgcgagcagccccgtttttccatctgatgaatcggccactccagcaggtacgccagtacaattgccaccagcagcggcgctaagataccgctgaaaaaataaataattccgaaacccgccagtaaaataacggtcaaagcaactgcctgcggatcggcaaaacgtcgtcggtaccactgaatgatcaaatctaacattgttctgctcccgggattaacggcaaaaatatgacaaatcctgcccaccgggcagactgtgtgaggattttacttgagtgtttgctatgatacacgaattattaccagtgataatcaacggggaaagcgtcatcctatgaatacgtttctgaaaaaaccgttagccgtcttactgagccttgccctgaccttcccggtactgcctgccgcacaggctgcggttgaggatgcgttacctgaaatcggcaccaccgccggcggtacactcagtatcggacaggaaaacctgatgggggacttttatctgcggatgatccgcagcagctccccgatggtctatgatcctgttttgctgcaatatatcaataatctcggccagcgtctggtctcaaacgctgactcggtcaaaaccccgtttaattttttcctgatagccaacccgaacattaacgcctttgccttcttcggcggcaatgtggttctgcacacctccctgttccgctacagcctgacagaaagtgaactcgcctctgtgatggcgcacgaaatcgctcacgttacccagcgccacctggcgcggatgatggaagatcagcagaacaaagcaccgctggcctgggcggccactctgggctctatcctgcttctgatgaccggcaccccggtcggtgccgccgccatgacctcgaccatggccgggatccagcagaatatgatcagctttacacaatccaacgagcaggaagcggaccgcatcggcatgggcacactgagccgtgccgggtttgacccgcagggtatgccggactttatgaccatcatggtggatatgtcccgttacagctccaaaccgccggaaatgctgctgactcaccccctgccggacagccgtctggcggatgcgcgcagccgtgccggtcagatgccgcgtaaaaatccgccacagtcctttgatttcctgctggcgcgcgcccgggcgatggcaatgtacggcggccagccgctgcgcaatgcgactgaccagatgattgataactacagcaaaggcaacagtaaagaacaaatggcggcggattatgcccgtgccattctgctctaccgtgacaacaaatatgaacccgcctcacaaattctgtcgaaattactggctgccgatcctgacaatgtctggtttatcgatgtcatgacagatgtggatatcggtctgaacagaacctctcaggcagtgaccaggctggaaaatgccctgaaacgggaaccggggaattcggtatatcagataaacctcggtaatgcctatattcagaataaacaatatgataaagcaactaagattctgcgcaattatacctttgatcaccctgctgacccgagcggctgggatctgctggcagaagcaggcggaaaagccggccgccgcacggacgaactggccgcacgggcggaatatcagaacttaatgggcaactttgacggtgctatccgcagcctgaccgaagccgcccgtcaggcgaaacccggcagttatgatcaggcgcgttatgatgcgcggattgaccagatccgccagttacagctgcaattcaaacaatttaaataatgaggaaaaccatgactgagactgtcactatctggcacaacccgcgctgctccaaaagccgtgaaactctggcactgctggaagaaaacggcgtgtctccggcagtaatgctctatctggacactccgccgtcagtggcagaaatcaaaactgtgctccgtgagctgaaatttgatgacgcccgcaaactgatgcgcaccaaagaagccctttacagtgagctggggctcgcgacagtgaccgatcaggaagcactgattcaggccatgcatgataacccgaaactgattgagcgcccgatagtgattaaaggcaaacaagcccgcctcggccgtccgccggagcaggtgctggagattatctgaacctgatcatctgtccccggtgaccgccgggaacagaactcagaattgccttcccttacagcgggaaaacgcctcgataacggcattacccaactcttcatctgaagccgataccggaataatgacataatcagtttctgatataccatcaccgtcccaagcttcaagtttaatatggtttgaaggttttattgtaataaggtcaccaacctgccttgcattacatgtattcatttgtttaaaaagtgtttttttatttttatatccgcgcaattgaatgatgtttttaatccattcttcatatctttcttttacttttttatagtcaaagaaatcataatttcccggatctactatccggctttgtttcaggcatttctttaaacacaaaccgagcatttccgctgtggtatcttttgataacagacaagactcaaacaggttatccacaattaaaataccatgcccggacatggtatcaacatgataaaaatcgccattaaaacctattctggcatttaacccctgttcagtattttggttcatatttattcaccttttataatggttattttaatctctatattcttatcattcgctgaaccaatgataccttatgtcctccggtaactgccgggaacagaactcagaattgccttcccttacagcgggaaaacgcctcgataacggcattacccaactcttcatctgaagccgataccggaataatgacatcgtcagtttctgatataccatcaccgtcccaggcttcaagtttaatgtgatttagaggctttatttcaataacattaccgacttgctttacaaggcatttgttcattttcttaaaaagtgattttttattcttatatccgcacaaacccattaatttttttatattgtcttcataattttctttatttagtttatgatcaaaaatataattctcttcaggattaatatcctcattttttttgagaacttgtcttaagcttataccaacactgctaattaccgcatccccaggtataataatattaccaaacaaatagtccggtattaacaatccatgatcgatcatcctcaagaaatagaaataactcccattaaagcttatgcttgcattcagttcatcagaatttacttgactcatgctaatcaccttttattatggttattttaatatctacattcttatcgtttgcgttctttatagcactatttattgacttccattgctctggcgtcgttttttctgggaggccaatgtgcaaaactctcttttttatattatctgttctcaatggaacgtcatccattgaataatttttaaactgagctattttattaacatggccattaatgatatattttatggcatcaggtttatttagtctactatctgtttgagtgttaatagtttttacgctaatcgctattttatctttactgtcataataatcaaaggttttgaatccatccgggagttttgagcctggcggtaattgtgtaccaatataatgctcaaacggcataccctgctggttgacagaggaacctgactgataccacttcatcgggattttattgccctttttatcagtggtatagatttgatttaaatctgcataactgacctttctgatatgtttatgcattctggcaggattacctctcctgccattcactgatgacatcaatatactgtcgataataatttcggcagttgcttttttcagaccggtaaaatctgttatatattccgcatattgattacggacaaaatcatcaatatcatcatgtctttcagtttcactgtaagtaaaaagctgtacttttccaggtgcaactgaccagggataataacgaatgccgtcatccgcttttgtcacccagtaatttgtcagtaaattatcttcaagatatgtctccggatattttgccattaacacatcaaaacgtaatttatccggtgaatttgcagattcctgcacagtacagttgatcagacggcaacctgctgcaagcaggcgctcttttttaaaattatcaccgtcagccagttcctctatcgcctttaattcctgcaaatgaaactgacggttataacgttcaacgatctcagcagcatccgccgcagtggtcagcccgttgatatggcctgttgcaatcaatccggcaacagcacctgtcatccgggccagctgtgcctgttgttcatgttcctgcgctgtctgatctaaagaatcgcctaatataataccggctgccgacgctgccagcgccccggtaaccgctcccctgacactccggttggtcagctcggctctgacagcggcaaccgcagcatgcgtaattgctttgcccggttccgttaatatttcaccgtggtcaccaattaattttgcgccttcagcattaaactgacttcccgtgttgctgagaagcgcactaataaagttctccctgaaacttgtttctgatactgccgaacccaccgctgagctgattacagactgggcggaaacacgttgtgcaaccttgtgccaatctccgtcactcagtaacggaatccgcgattgtgccggatttccgttctgccagcccatcgatttatccaaaccactgaacgcccctccgacaaccatctgaccaataacagatttaacactttcactgcgtcccagagacttaaatgtttcagataaattgcctttattctctgccagtgcaaccgctgcctgtgttgtcagtgctatcattccggaatgcgcagctccggaaataacagcggcagccgttcctgtggctgcggaagatgcggtactccctgcccatgcagccagcccggagcccgatgtcgcagcggtgacggcgacagccagaacagccgatgccaccggattaaggtgctgctctttatagtcccagcgctgataggcatctgcgacccggttccactgaacatcatcacgggttatcagttctttcagccaacctgttccggtatggctgctcagcatcattgcggattctttaaattcaggaatgctgaaagttttactgtctgcggttatgccttttgctgcatcaacagataaatttccgccgtaataaatctgcggcaaccgccagcggctcagcgagtgcccctgatcccggcgggtaatgtaaaaaccctttgaatggctgacggtttgctcataaagtgagtcgttaacagctttaaaattaattttccctgagatacttttcagcctggcatttttagctgctgaaatttttgcagcttcaagtgtgatatcatccagggcgattaaattaatatcttctttcgatgtaaattctgtcgttttattttttacttcatgctttacctttgtaacttctttttttgttatacagaatgtccaacgattacatttctttttcttatcttcataatgactcgtttcttccattgcctgtgcatataaatacccgccctttgccgagatatccattacaccatcagaaataagctcagcaccctgaaataaaacactgccttcagacaatagtgttaatttattcttgctttttaccagtgtactgacatggcgatatgtatcttccagataatcacgtcttttctgacgatagtgtattttttcagatcccaactgaatatttccactgctatgaatatatatatcatcatcagaggagagtattgctgcatgcagattaacatcaccttccgccactaatgtaatatttttctttgctgtaagataagaacttacatagcgattatcaatgtaatcatcataagaataccttattgctgaataaggaatccctgccaggctaaactccccgccagaaaacaataataaagactcatcagcatgcaggcctgcattcaatagatttacatctccggcagagttaataataaagtttctttctgaatgaatgcgtattttgggccttaaatatcttgcatagatatcactacggccttcccattttttatcaaaggtaatatctatatttccgccggaataaaaacctatatcatttttgctgctaatatctgtaccattaatagcaatatcacttccggcattcagggtgatataatctgaaagtgtccattcctgaaatttatctgacagtgattttatttcataatctgccttttttgtggatattcctgatatcgttttcggatcaaaatcaatcagtatattttttcgggaagataaatccacatgactatttaatgtgaatgctatatttttgaatgtaatatcacctcctgcatctgcatagatgccaccaggtgcatgtaacagaggcagcgcagaaatgtcagatgtaaatacaggcctgattcctgttgagtatattacatcgcctttctttgcaataagagacagctcaccggactttatattggtattttcaagttcaatactatctgctgttaatgataatgacttacccgctaccaatgtactttcacgtgaataaattttctctttagcctgaacatttaaattattaattgcacctatttttgacttcaaacctattgatgaagaattcaacaatatattttctgcagctaaatgatgactaaaactatctctgataatctcatttaccggatagtgtttttcagggatcttactctctacattaattgtattgctataatctataatcagattttctgaacttacagatggactgtcagccaccccatggctaatccatgtataaaattgctcctttttctgaaagggaattttaatatcattaaccattaccccggggggaatagtatccggctcaacaaaaaaacgcagccattcactgtttatatcttccggttcatatctttcccatagttttaaaatacccagaccatgatttttaatattgatatccttgccggttaaaactatatttccccctgcagataaaaatgaatcattattgtcaaagtgattcgcatttatatatatttttttaccggaatctatatacgcaggatgataatcactcttatatctcactgcatatttttcaacattaacactgtcattagctagtaaatctatttcatcaaaccatttttcatatttaaagttttttaattccggatatacaatcaataacccatctcgccgccacataggcaaataacgcaactgattcccgacgctgcgaacctcggtagattctgccggaatcttaaaaaactcaacaggctcagagttactgacattagttaatgtctttgcttttataattaaattaccacgttcagactttagtgaagctgatttattaacaacactcttgctaaaatcaccttccggatttttttgtatccataaattttcctctgcctgtataattgcttcgtggccctgattattaacaacatcagaaaaaatacgtgcattaccttttgatataacctctccggcatttaaaatatcatttgatataagagtagtatcacgaccggaagcaaccttttctttatcttttataataatgttgtcggctattactcttattctttcttttgatgttatatttcccgataataataccgctttttttgctgttacacttataccattattaacagactcaatattatttagttgtacattgccatcactacttatattaataatgcgaattttttcagccaaaatcccaccttcctcagtcatatttactgatgatgattgattccccataaaaccggatatagattcctgaataccatcctggtaattaattttatttgtaccatttataataaaaagattttttgtatttatctttccatttattttcgtatcagcactgataagattagtatttttttgtgcatatgtatccatcccttttttatttatcgtgattgatccatttcttacattgagagatgaaaatttattttcaggattaaaattcacattccccgtggcaagtgtaatatctggcgtgttaatgaaatgacagccatcacaggtaataccattgggattagcaataataactgatgccgggttaccggaaacctccatagcccccgaaaagtcagatagaccatcactgattacctcattaataattaaactggcactactcccccgcagatttatgtttccctctatttcacctgccagataagattgactgtcttctgttccgttatttaataccacgccgacttcagaaacattaaacttactgtattgattatgtgacaatccatttccatccggccttgaaatgtcaataatagttatatctcttttgacatttacttttaaacggttattagccggagttatttctgatgcatatatataatagggaaaaacagaaaataatataataaataattttttcatcttattaataaagcacataacacctccggtgtgttaattaagcaatacagtcatacactcaccagaagatatcctatgaacaatcattgctgatactcatgatgaccttatcaataataattaattcattcctgaaacaaataccctgtatttttatttattaatttataactttatctatttttagatcttatgttctttttatgaaatcgtcatttatttcaagtggtaaagttcgtttggttatttacacttaatataatgattaaaggaataaatcatgaaaaaaacattaacggcgttatcattcatttccgttgcattattctctgctgctgttgccgccggaccgggaagcacagaatatacctaccgtaacggcgataaaatccgggtagccagtccggaagcggaaacatcgctgtttaaagataaatcagggaaaccggttttggtgattacatcaccggataaccgcgggatctcgcataatatttttactgactataatgtcggcaagcaaggcctcgtcattcataataaagaaaatgccaaaaccattattaatgaagtgctcggcaacaataaaacccacctgcgcggtaatacctttgtcgccggcggcaaggccagtctggtgattgttaacccgaatggtgtgatctgtcaggattgcagctcaaccaatacctcactctattctcaccgcgaaacactgccggtggttatcaatgctgcaaaaaataatgaggtcatttttgatgtccgcaaaccgctgcatgcatcagaacgtctgaccggcatcagtcataatatttccgtaaattcaccgcgctgaccccctgttataccgccgttttcacggcggtattgcttttatcagaaactttccctgccgcagactgtcatacctgtaacaacacagccctgtgatcacaccgtattaacttaagaaaactcttattgcggcgatcacagaataacgtattgataatacagataactgactgtgtatcatcagggaaaaaaatgaccatttatgatctaaaaccgaagtttcagaacttgctgcgtcccgtggtaatccgcctgtttaatgccggaatcacggccaaccaggtcacgctggcggcgatgttcctttccctgcttaccggtttcatcctgatcctgtttcccgatccgcgcctgtttctgcttctgccgccggtgctgtttatccggatggcgctcaatgccattgacggcatgctggcccgcgaacatcaccagaaaagccgcttcggcgcgatcctcaatgaactgggcgatgtggtatccgatacgattctttatttcccgtttgtcctgctgtttccgggagcagccatctggatactgctgaccctgtttctctctgtactgactgaatttattggtgtactggcacaaactatcggggcatcacgccgctatgacggccctgccggaaaaagtgaccgcgcctttctgttcggcgcactgggtctgtgggcggcggtttttcccgcatcccttgactccgcactgtttccggtgctgtttgcggtctttgccgccctgctgtttcttacctgttatcaccgtatccggcgtgcgttgcaggaatctgcgcaacaaagcgcatctcaaaaggactgattatgagtgtatcttctgattatccgactcagcgtgaatccattgaatctcactttaccaccagtgaccagcagcggttattcttccgttactggccttccgcaaccgcagaaaagaaagccattgtgctgtttcaccggggtcatgagcactccggacgtgtggcacatcttgcggatgagctggcgttacctgatttcgcggtatttgcctgggatgccagaggtcacggccgcaatgacgggcccagaggctacagcccgtcgatgggcacatctatcagcgacatcaatgaatttattaacttcatttcatctgagtatgaaattcctatcgagaacatggtcgtgctcggacaaagtgtcggcgcagtcaccctgaccggctgggtgcatgatttcgcaccgaagatccggggtctggtactggcttctccggcctttaaagtcaaactctatgtgccgtttgcccgcagcggactggcgctgatgcagaaaattcgcgggctgttttatgttaattcctacgttaaagccaaatatctcacccacgacccggtacgtatcgcctcatttgagcgggatccgctgatcacccggccgattgccgtcaatatcctgctggaactctacaaaaccgctgaccgcctggtggcggatgctgccgcgataacagtgccgactcagctgtttatctccggcagtgaccacgtagtgcaccgtaagccgcagaatcagttctatgcgcggcttaacaccccgtataaagaaaaacatattctgccggggttctatcacgacaccctgggcgaaaaagatcgtcatatcccgctggcggaaatccgccgctttgtcaccaccctgtttgaacagccgcgctatcagcacgattaccggtttgaggatgtgtgcagcgccggtgccgatgcttatcgtgaattgcaggttccgctgccggattactgcccgaaaaatctcggttataaactgctcagcaaagcgatgtccaccctcggcaaagcctcggaaggcgtcagtatcggctacgataaaggctttgattccggatccaccctcgattatgtctaccgtaaccaggctcagggcaaaggcattttcggccgcattgttgaccgccagtatctcaacagtatcggctggcaggggatccgccaacgcaaagtgaatattgagaaaattctgcgccgcaccatccgggcattgcaggaagagggtcagccggtgcggatcatggatatcgctgccggtcagggccgctatctctttgatgcaattaatgattacagccggatagaatctgttctgatgcgcgattacagcaccatcaatgtggaacagggtcgtttacagatcaaagagcgcttcctggaagacaaaatccgttttgaagagggcaatgcctttgataccgccgatctggcggcggtcaccccgaaaccgaccctcggtgtggtgagcgggttatatgaactgttcccggaaaaccatctgctgcgcgattcccttgccgggctggcgcaggcgattgaaagcggcggttatcttgtctacacctgtcagccgtggcacccgcaggtagaaatgatagcccgcgttctgccgagccatcagggcggaaaagcctgggtgatgcgctgccgcagccagggggaaatggatgcgctggtggatgaggccggatttgaaaaactggatcagctcattgataactggggtattttcagtgtctcagtcgccagacgccgctgattgttatcatactgatgaagatgcgcctttttgcgcatcttctgttttacagggaatgaaaaattatgtctgatgccgcactgccgctgcccgcttcccgccgtaaacggtggggatttgccctgctctggctgctgtttctggcacctttcttttttctgacttacggacaggtcaatacctataccgcgtcgctgccgtcagtcccttcttttgcgttcagctgggaaacacatattccgtttctgccgtggacaattattccgtactggagcatcgatctcttctacggattatccctgtttatctgcacctctctgcgcgaacagtgtattcacgggcttcggctggcagttgcgtcactgacagcctgcgccgggttcctgatctttccgctgaaattcagttttctccgtccgcagacagacggtaccgcaggctggatgtttgaccagctggagatgtttgatctgccgtttaaccaggccccttctctgcatatcattctgctgtggctgctgtggctgcgcttccgggcgcacacaccgcagaaatggcaatggcttctgcacctgtggtcaattctgatcttagtttctgtactgacaacctggcagcaccattttattgatgtgatcaccggtgccgccaccggtgtggtgataagctatctgctgccggtaagtacacgctggcagtgggccccgcaccgtatccgccgcggctatcagctggccgggcggtacgccgttatttcgctggtgctgataacagcggctgtcgtgataggtggtcagggctggtggctgctgtggccggggctggcatttttatgcatcacggcgggttatctcggggccggcgcatcagtgtttcagaaggacagcgccgggcgcatttcaccctctgccgcactcctgctgctgccataccggattgcggcgcaaatcagctattactggtatgcaaaacggtgccgtcacaccagtgtggtcaatgagcatatcgcgctgggtggttatcctgccgcaccactgacggctgccgccgtactggatatgacaggggaatttccccgcagtcgctataccgccgggctggcttatcactgtcagccgcagctggatctgtttccgctgacagagatgcagattgaaacggcggtgaacaatctcagccgcctggcgcaatccggtcaggtttatgtacactgtaaactgggttacacccgcagtactaccgtcgtggtcgcctggctgatacgtgccgggctggcagacaatgtggagcaggcgctggcggccgtcagacaggcccggccacaaattgttctgcgggaacagacaattgccgccctgacccgctgggcagcccgttacggaaaaaacgatgaataacagacctcatgacgaacagataattgtgatttttacggcgggctggcgttttttggctgccttatcggtgatggcctttctgacgcagtttctgctttatatttccggtttttccggtgaatatccgatggcggcggggatcctgttctttctgtgcgccatgtattttatcttccggttgtggcacaatcgtccgataccgatatttttgatgaatccctgacgacactgtttccgggcagagcacagcacacccacttctcacagcgctggcgcggcacaaaacggttgtttcagcagggtgcactctgtatggtgctccagtggggggtaacggtgattgccctgcttaactgatggtcacagccgcaggatatctttgacaaacggaatggtcagtttgcgctgggcaacaatcgaggcatgatcaagcctgtcgagcatatcaaacagtgtgcgcatctgacggtcgaggcgttttaagataaagcgcccgacatcttccggcagctcaaacccgcgcagctttgcccgcagttgcagtgcctgaattttttcgtcatcactgagcggatgaagtttgtaaatctgcccccagtcaagacgggaagcgagatccggtaactgcagcgggatctgacgcggtggtctgtccccggtgatcagcagacaggtcttgccggtctccagaatgcggttatagagattaaacagcgccatttcccactcttcatcccccgcaatacactgcacattatcaatacagaccagcgacagatgctccataccttccagcacatccggcacaaaccaggcgcgcttatccagcggtacatagccgaccgcccggtctttggaagagacttcggcacaggccgcatgcagcagatgacttttaccgccgccgtcacgggaccagaaatagagataactgccgtgcggctgattgatagccgcctgaatagcggataacagggatgcgttttcccctgcgtagaaactgttgaaagtctcatcatcagggagagagagcggtaatgacagctgagatggcgtgttcagagttacctcggccaacgggtgaacaaacaccgttagtttaacataaattcaccggctaaatgaaccttaacaacatacttcccgtactcagtgacggaaaaagccgcagaaccaacatgcccgcctttacgggctcatcagtcactgcggctttttttgttatctgaatcagtctttcttcacttcatccagattcacatccactacccgctcttccggacggataatattcaccagacggaacaccagagccagaccaatgccgacaaccgttgccagtgccatgcctttcagttcagccgcaccgatatggatggtcgcaccactgacaccgataatcaggataaccgccgtcagaatcaggttctgcggcttgttataatccactttggaatcaatcagcacgcggataccggatgcaccgataaccccgtacagcagcagcgatactccgcccatcaccggcaccggcacagcagcaatcgcggcagccagtttaccgacacaggagagcagaatcgccagtaccgccgccccgccgataacccaggagctgtacactttggtgatggccataacgccgatgttttcgccgtaggtggtgttcggtgtggagccgaagaagccggacaatacagtcgaaaaaccgttggcaaacatagagcggtgcagaccggggtctttcatcagatcacgtttgacaatattcgccgtgaccaccaggtgaccgacgtgctcggcaatcaccaccagcgcggccggtaagatggtcagaatagcgaaccactcaaaacgcggtgtgtagaatgtcggcagtgcaaaccacggtgcttcacttaccggggtcaaatccaccgcgcccataaagaaggccagcgcatacccggtcagcaccccgataaggatcgggataatcgccaggaaaccgcggaacaccacagagccgagaatcgtcaccccgagagtagtcagggagataatcagcgtggtgctgtccggtgacgcaccatccgcaattttcagtccggccataccggcagcggttccggccagttcaagaccgataaccgccacaatcgcccccatggccgcaggcgggaacaacacattgatccagccgcgtccggcgattttgacaatccccgccaccagcataaataacagcccgcagatgataaacccgccgagagcaagttcatacccgagcggcagtaaaatcagcaccggtgaaataaaggcaaagctggagcccagatacgccgggatttttcctttacagataaacagatacagcagcgtcccgataccgttaaataacaggatcgtggccgggtttacctgaaacaggatcggcaccagaacagtagcaccgaacatcgcaaacagatgctgtaaacttaacggaatggtgaccagcagtggtgggcgttcatcgacttcaataacgcggcgcgtcatcttaaacctcttaaatgattactcagggatatgccaaaaaaaagccgactatcaagtcggctcattaacttatttcgtaccaaatatcttatcgcccgcatcacccaggcccggcacaatgtaaccgtgttcgttaaggtgatcgtcgatggatgcggtatacagctcaacatccggatgggctttttccagcgctttcaaaccttcaggtgcggcaaccagcacaaggattttaatcgcggtacagcctgcttttttcagcagatcgatggtagcgatcattgaaccgcctgttgccagcatcgggtcaaccaccagtgccatacgctcttcaatattagaagctaatttctggaagtacggtaccggctccagtgtttcttcatcacggtaaacaccgacaacactgatacgggcactcgggatgctttccagcacaccgttcatcataccgatacccgcgcgcagaattggcacaacggtaatctttttacccttgatttgttcaatttcgaccggaccacaccagccgtcaattgtcactttctcagtttctaagtctgaagttgcttcataggtcagcaggctaccgacttctgaggccagttcacgaaagcgttttgtgcttatatcatgatctcgcatcaggccaagtttgtgtttaacgagcgggtgttttacctcgacgactttcatgggttctcctactgtgtaagccctggcggacaaaaaaatcgcgagattataccgcttttctttcgcagcgccaccccggatttgttgattatagtcaattatcacgcgtttcatgttcgttacatgaataagtgtgatctgacgcattttgacaaaaaccggcgtaaatcctctcgcaaacgtttgcgtggcctgttagaatagccgcgttttcgatacacccacttacttgcaatcgccgttgggggccgcagtgactgacaaaacttccctgagttacaaagatgccggtgttgatattgatgccggtaatgccttagtttcccgtattaagcatgttgtcaaagagacacgccgtcctgaagttatgggcgggctgggtggtttcggtgcgctgtgtgcggtaccgcagaaatataaagaaccggtgctggtttccggcactgacggcgtcggcaccaagctgcgcctggcgatggatctggcgcgtcatgacactatcggtatcgacctcgtcgccatgtgtgtgaacgacctggtggtcgccggtgctgagcccctcttcttcctcgactattacgcgaccggcaaactggatgtcgatactgccgcccgggtggtcaccggtattgccgaaggctgcaaacaggcgggttgtgcgctggtcggtggtgaaaccgctgagatgccgggcatgtatcacggcgatgattatgacgtggccgggttctgtgtcggtgtggcggaaaaatcagaaatcatcgacggcagcaaagtccgcgccggtgatgtgctgatagcactggcctccagcggcccgcactccaacggctattctttgatccgcaaaatccttgaggtcagcaaaactgacccggcagccacagagcttgacggcaaatcactggcggatcatctgctggcaccgacaaaaatctatgttaaatctgtgctgaaactgatcgaaaacaccgatgttcacgccatcgcccacctgaccggcggcggtttctgggaaaatatcccgcgtgtattaccggcctgcacccaggcgcggattgatgcctcatcctggcagtggccgtctgtctttaactggctgcaaaaagccgggaatgtggaagactatgaaatgtaccgcaccttcaactgtggtgtcggtatggtgattgcgctgccggcagcgtctgtgcctgccgccctcgccctgctgacagaggcgggtgaaaatgcatggctgatcggtgatatcgcggtctgccgtgaagatgaaccgcaggtcatcatccgctgatgaaaaaacgccttgttgtcctgatttccggcagcggcagtaatctgcaggcgttgattgacgcctgcaattcaaaagctctcaatgcggaaattgttgcggtcttcagtaataaagcggacgcttacgggttactccgcgcacaacaggccggtattcccgcactggcactcagtccggcggaattctcttcacgggatgattttgatgccgcattgcaggcacagattgatgagtatcaaccggatttactgatcctcgccggatatatgcggattctgacacccgcctttgtccgccattaccacggcagaatgctcaatatccacccgtctctgctgccgaaatatccgggcctgcacacgcaccggaaagccctggaaaacggcgatgccgaacacggtacctctgtacattttgtcacggaagagctggacggcggcccggtcattttacaggcacgcattgccgttctgccggatgatactgaagacactctcaccgcccggatacaacaggaagaacaccgcatctatccgcaggtggttaactggtttgtgcaggggcgtctggcactgaaagaagacgggatatatctggacgggaaattatattttcacaatacgctctgattctctccgcccggtttttccgggcgtttttcataactaccgcagtttcgccatctcattaagatacgctttgcgctgtccggtataattccaccacggctgtgccggttgtcctgcaagaaaatcagtgactgaccagaacacatcaataacacagagatcctgacggacgccggttaccgcgcagagcatttcatacataatcaccgggtctgaaccggtaatatcctgcggcgtctcataccccagcagacgcagatcttccgccatcgcctcgccgatattcggcaggtcggtaagcgtataaagacgggtgcggcacacttttgtcgggttcatggaaatatccggtatttattaatgatatgcgtactaccacatactttatcatctgtctgctgtgaccggtactcaaataacacgtaattgccataattttacacggttgtgcccatcgtgacgcggaaaagcggatccccggataattccgtttctgttatgtgttacactgactgataaaatacaaccaatatcgaggtgatttatgtccggtggtactgctgttccgcctgtaaaactgcgcccgcttgagcgtgaggatttagcttttgttcatcagatggataataacgccagcattatgcgttattggtttgaggagccgtatgaagcctttattgaattaagtgatttatacgataagcatattcacgatcagtcagaacgccgcttcattgtggaaagcgacggcaccaagatcgggctggtggaactggtggaaatcaatcatgtacaccgccgcgctgaattccagattattatcgccccgtcacatcagggtcacggatttgcgtcccgcgctgcccgtctggctatggattatgcgttttctgtcctcaatctgtataaactgtatctgattgtggatatcgaaaacgaaaaagcgatccacatctataaaaagctcggttttcataccgaaggccagttaattgatgagtttttcgtcaacggggaataccgcactgccatccgtatgtgtatttttcagccggaatatctggtcatgaaaaataaatctgcggatgcggaaagctacgttgaaaaaaatgcccgcgtaaagcagaacctgtaacgattttttagtaaactgtacgctgtgttcaaccctgattcagagtaacccgttccggagtaacaatgtcccaagataggctctatatggaaaaagaactcagttggctgtcgttcaacgagcgggttcttcaggaggccgccgacaaacgcaacccgctgattgagcgcatgcgttttctgggcatttactcaaataacctggatgagttttataaagtccgctatgcggatgtgaaacgccgcatcctgattaatgaggaacagcgtggttccggcgccagcgggcgccatctgctgcgtaaaattgaaaacaaagtggcaaaacaggatcaggcatttgataccctgtataacgacctgctgctggaaatggcacgtaaccagattttcctgatcaacgaacgccagatttcgccgaaacagcaaatctggctgcgtcagtatttccgtcagcatctgcgccagcacatcacgccgattatgatccagaccagcaccgatctggtcgaattcctcaaagacgattacacctatctggtggtggagattgtcaaatccggccgtgagacccgctatgcgctgctggaaattccgtctgataaagtgccgcgttttgttaatctgccgaccgaaaacggccgccgccgccagtcgatgatccttatcgacaatattctgcgctactgcctggatgaaatcttcaagggcttcttcgatttcgatgccctcaatgcctattccatgaaaatgacgcgcgatgcggaatatgacctcgccaccgaaatggaatccgggatgctggagctgatgtcctccaccctgaaacagcgtctgaccgctgagccggtgcgctttgtttatcagcgcgatatgccggatgaaatggtgacgctgctgcgtgaaaaactcggcctgaccaatgatgattccgtcattgccggcggtcgctatcataatttcaaggacttcatccgcttcccgaatgaaggcaataagaatttattaaacaaaccgctgccgcgtctgcgtcatgtctggtttgatcatcaccgcaacgggtttgatgctatccgcgaacgggatgtgctgctctattacccgtatcacacttttgagcatgtgctggaactgctgcgccaggcctcttttgacccgagcgtgatttccatcaagatgaatatctaccgtgtcgccaaggactcccgcattatcgattccatgatccacgcggcacacaacggtaaaaaagtcaccgtagtggtggaattacaggcacgttttgatgaagaagccaatattcactgggcgagacacctgaccgctgccggagtgcatgttattttctccgcgccggggctgaaaatccacgccaaactgtttattatctcgcggctggaagacggggatgtgatccgccgttatgcccatatcggtaccggtaacttcaacgaaaaaaccgcgcgcatctacacggattactcgctgctgaccgccaacgaagagatcaccaatgaagtccggcgcgtgttcaactttattgagaacccgtaccggccggtttcctttgataacctgatggtgtcgccacagaattcacgggcaatgctgaatcagctgattgatgatgaaatagccaatgcactggccggttatgaagccggaattacactgaaaatcaacaacctggtggataaacagctgagtgagcgtctctatgatgcctcagaagccggggtgaaaatccgtctgctggtgcgcggcatgtgcgcgctggtgccgggacaggtgccgtacagtgagaatatccaggtgaccagtatcgttgaccggttcctggagcatgaccgggtgtatgtgttcaccaacaaaggggacgaaaaagtctatctctcctctgcggactggatgacccgcaatatcgattaccggattgaagtggcggttcgcctgctggatccggtgctgcgccgccgggtgctcgatattctggatattcagttcagtgataatgagaaggcgcgttatctcgataaagagatgtccaaccattatgtgccgcgcggcaacaagcggaaagtccgctcgcagatggcagtttatgactatattcgttccctggaacaaccggataattaaaaggcccgtgcatgccattatcactgatcactgaaaaagatcgtccgctggaaattgcagccatcgacctcgggtcgaacagctttcatatggtgattgcccgtattgtcaacggcgcactccaggttctcagccgcctgaaacagcgggtgtatctggctgaaggcttaaatgatcagaatgagctgagcgaagaagccatggagcgcgggctggcctgcctggcgctgtttgccgagcgccttcagggctttcccgccgcacaggtcacgattgtcgggacacacagtctgcgtgaggcagtcaatgcgcacgagtttctcgaacgcgccgcgtccgttatcccctatccgattgaaattatttccggtcacgaagaagcacgcctgatttttatgggtgttgaacacacacaaccggaaaaaggccgcaaactggtgattgatatcggcggcggttcaacagagctggtgatcggcgaacgttttgaaccgattttaatcgaaagccgccgtatgggctgtgtcagtttcagccgtcagttttttccggacggtaaaatcaccgaggccaactttaaccgcgccaggctgatggccgtttccaaactggaaaacctggcgattgctttccgtgtgcagggctgggatgtatgcctcggcgcatccggcaccatcaaagcggcctgtgaaatcctgcgtgaactgggggagcgggacggtattatcacccctgtccgcctggaaatgctggtcaaacaagtgctgcgttacaaacggtttgatgccctgaatttaccggggctgtctgacgaccgcaaaaaagtgtttgtgccgggcctggcaattctgtgcggcctgtttgacgcgctggaaatcactgaactgcgcctgtctgccggtgccctgcgcgaaggggtgctgtatgagatggaaggccgtttccgccatcaggacatccgccagcgtaccgcgcaaagcctggtggaacactataacgtggataacgcccaggtactgcgtgtcctcaccaccatgaaaaacctgtaccgtcagtgggcggagcagaatccgtccctggttgatccgcagctggaagccattctggtctgggcggtctggctgcatgaagtcgggctgagcatcaacctttccggcctgcaccgtcattcggcctatattctgcagaacaccaatttaccgggattcacccaggaacagcaactgctgctcgccacactggtacgttaccaccgcaaagcggtaaaaagtgacgatatcccgaaattcacactgtttaaacgtaaacaggtcatccccctgatacagatcctgcgcctcgcggtcttactgaataatcagcgccagtccaccaccaaacgctcctcactgcgtctggagaccaatgaaggacactggaccctgttttttccgcgccgctatctgactatcaacacattaatgcagcttgatctggaaaaagagcaggcttactgggatgatgtgcccggctggcacctcggtataaaagaagaagacgtctgacagagaatccccggccagtcttatttgtttaaaagttttatgtgtaaaggaaaatcatgtctgaacacagtttctccattgataactcatcaccggtcaatccgcactcccagcggctggcccacattcgtcagcaggttttgcctctgttcctcaacgactcacagtttgtggaaaccattctgggcaccgccgatgaacatgccaggctcagtgatgatgaactgcattcaaaatcgaagttagtcaaaaatctgctgactgacctccacgccgctgaccttgcggatatgctggaagccctgccctatgatgagcgtctcgcgctctggcatctgattgataaccaccagcgcggggaagtgctggtggaagcctctgtgtccgtgtgggacagtctgattaaagatatgtcagacaaagagctgctgcgtgccgttgccaccctgcatgtggatgagcaggcgtatatcgccgagcacctgccgcgcgataccatgcgccgcctgctgacctatctggaaccaagtctgcgtaaccgcatccgcaccgttcttcagtacccggcggacagtatcgggcagatgatggactttgagtttgtcaccgtgcgcggcaatgttccgctgaaaacggttcagcgttttctgcgctaccgcagcaatatcccggaagccaccgataaaatctttgttattgacagcaataatattttgcagggcgaactgccgctgaccaccattctcacccagtcgccggacaaactggtctctgatgtgatgaaaaccgagccggtcaccttcctgccggatgaaaaaggcgaagatgcttccggtgcattcgaacgttatgacttaatttccgccgcggttgtggacaataacgggcggctgctcggacggctcaccgttgaggatatcgttgataacctgaatgaagaaagtgaagaaaacatccgtcgtatggggggcttaagtccggaagaggatgtgtttgccccggtcggccaggcggtgaaaaaccgctgggcgtggctggcgattaacctctgtaccgcgtttgtggcttcccgcgtgattggtgtgtttgagcataccatttcccaactggttgcactcgcgaccctgatgccgattgttgccggtatcggcggtaataccggtaaccagaccatcaccatgattgtccgcgctctggcgcttcaccagatccagaaaggcagtttttccttcctgctgctgcgtgagctgggcgttgcctttatcaacggcgtggtctggggcgggattatgggggtcgttacgtacctgctctacggcgatatcgctatgggtgcggtaatgacgctggctatggtgcttaacctgctgatggccgccatcatgggtgtgcttatcccgctgacgatgatgaaactcggacgcgatccggcactcggctccagtgtgatgatcaccgccatcaccgataccggcggatttttcatctttttaggtctcgccaccctgttcctggtctgatttttgctcagatagtcctctgcggccacggaaagagaagttttacttctgctctccgtggccgtttttgtctcttttggctgagtttcagccctcttgttatcaccccgccacagagtattatgatgccggactgacaatatccggtgaatatgatcacttctgtactgctgctctgaaataatcatcatgctcttcacacttatttatatttatttactgctgttcattcgtgagtatattgataagccttattcatataatgctattaatcgtattttataaacccgtattactggtaaataataataagggctgaacctttaattattccgctaattatctgttccggttttcataatatgctgtcattccggattccttaacgttattatccgtgacgcaaatcatatttagttcaataatccatcttatggcatacagcaagaatgttcatcttgttttggctgatgctgtttacaatatacggaacttcttgctataacaaagcataccctccggtaacagacaattcccgttttttatttccggttatccctgtgataaccgggatgctgttgccgccacctctcttttgggaaacacaaatgagaaaaaaaatgacacgccccccgtcattgaataaatgagtaaataaaaggacataattatgacaaccgacacatcgccattaagtcagcctcaggcaaggccattaaataaaaacgattataaaacactgggattatcctccctcggcggcacgcttgaattctatgattttgtcatatttgtcttttttaccggaacactaacccacctgtttttcccgggtgataacgagtttatcgcccagatgaaaacgctgggaattttcgccgccggttacctggcgcgcccgctcggcgggatcattatggcgcatttcggcgatattatcggccgcaagcgcatgtttaccctgagtatcttcctgatggcggtgccgacactggttatcggtatgctgccgacctatgaaagtatcggtgtggcagcacctgtcctgttactgctgatgcggattttacagggtgcggctatcggcggtgaaatgcccggcgcatgggtatttatcgcggagcacacaccgcaacagcgctacgggctgggtgtcggtacgctgacctccgggatcaccggcggtattttgctcggctcgctggtcgctatcgccgttcaggcttcttatactgcggcggaagtgactgcatgggcatggcgtattccgtttatcctcggtggtgtgttcggcctgatttcggtgtatctgcgccgctttttgcaggaaaccccgatctttaaagagatggcggccaaacggacattatccgaagagatgccggtgaaaacggttctgaaaaaccataaaatggcctgttttgtcaccgccgggctgacctggtcattatccaccgctatcgtggtgatcatcctgatgaccccgtccgttgtggttgaaaagatgtacggcattgatcgcacattgtcattacaggcaaactgcgtggccacactgaccttaaccctcggctgtattttctggggctggctggaagataagatcggcagccgtgtgacactggcattgtcctggggcggattagcgatcaccgcattccacttctacagtgcactgtcaccggatattgcggcggcttcgctggtgattaactatgcggtgatgggcttttttgtcggtgcgattgccaccacaccaatcatcagtacgcgggcatttccgccggcaatccgtttctctggtttgtcttttgcctacaacatggcttacgcggtattcggcggcttaacgccgatgctgaccggtgcctggttacagaaaagtgcaatggcaccggcgtattatgtggcaggcgtgtccgtactggcgattatcatcggtttcttaccgctggcacacaaaggctggacagcgcgtaaagcacagaatgtgaaaactgtcgcagcacaacagtcttaacgaaacaggtaaaacagcaagggcggatgattatccgccctttttcttttccgtcttccgaatcagcgccaggcagggtttttcattaccgaatatttacccgggccgataaaggccagtgcaataccgctgataaagaaatacatcaggctttcaatcgcccacgcccctgtcggatccagcataaaggttttatttaccccgatcatcagccaggcaacgaccatggtaaaagacaccagcaatgcggacggacgggtcagaatgccgaggataataaagaccggcgcgacaatttccccgaaataggtaccgtaagcaataaactccggtaacccgaaagaggccagcagcccttttatccccgccgcaccggtgagtaatttaccgataccatgaaacaacattaatccgccgaccgccagccgcagtaataatttccctgcatcgtcgtgtgataacagcctgttgattagacctgtcataatatacccctgttgaatgagaatcttactcattgtgagtatacgcagtgatacgcaaagcggtagcggcaacattcagtgacagtgaattccggaaaatttcattcattttaattgttaagaatatgctggcaaaaacaaaacccaatgctttatattttcttataatatctgtgtgttatctttttcaatactatcggtcaggtcttatttatccgttcgttaacaaaagccatgctgtttctgtcaaattatctgaaaatcatcatcaaaaatacttacctgtcttccgtctgtttcgtcacacttttttgaaagagttaacatcaatttgcatctctccgccctacactggcagacaggtttctgagtaatactgttgtatctgataaggagatgtcatgaagaagaatattatcgccggttgtctgttctcactgttttccctttccgcgctggccgcgatcccggcgggcaacgatgccaccaccaagccggatttatattatctgaaaaatgaacaggctatcgacagcctgaaactgttaccgccaccgccggaagtcggcagtattcagtttttaaatgatcaggcaatgtatgagaaaggccgtatgctgcgcaataccgagcgcggaaaacaggcacaggcagatgctgacctggccgcagggggtgtggcaaccgcattttcaggggcattcggctatccgataaccgaaaaagactctccggagctgtataaactgctgaccaatatgattgaggatgccggtgatcttgccacccgctccgccaaagaacattacatgcgcatccggccgtttgcgttttacggcacagaaacctgtaataccaaagatcagaaaaaactctccaccaacggatcttacccgtcaggtcatacgtctatcggctgggcaaccgcactggtgctggcggaagtgaacccggcaaatcaggatgcgattctggaacggggttatcagctcggacagagccgggtgatttgcggctatcactggcagagtgatgtggatgccgcgcggattgtcggttcagccgctgtcgcgacattacattccgatccggcatttcaggcgcagttagcgaaagccaaacaggaatttgcacaaaaatcacagaaataagcagtgatatctggtcagggcagtgcaatatctgccctgaaatccctgtttattcccacatccagcggtcttcccgatcccagccttttgttttcatgcagctgtagaaatagcggttgcggctgtcttcattcacatccatcacataactttccgttaccggtgtctgctctttgtaggttttgctgttaccgcagtcatcgtcttttttgcagcgtttctccacatcccgcatcacactgcgctgagcaacttcatttttcaccggataaagcttatgtgattccggttcacagaaagcatttgcctctgcccgtgtgtattcagagccgcccggaacttccacccagacagaagaacaaccggacagcagcagtgcagagacaagaataagtctgtttttcatcattatagtgtgtattatcagcttgttaagaatgcgtaatattactgcacatcataaactgagtaaaccgcaccggtaatatttccttaagggatgagaaagtggctgacataaaggcagactccgctgaaaccacgtatatttacctgtatcaacgttattttcacaattcttccatttttacgatcagatttaccggtacactatccccatcatatttcaggctgttttgtgcccttacgcgtaccccggcagtaccgggtaaaaaggaatgatgagtaatcccataatgaataatgtacaaaagagaaagaaacgcacaggcattacgattgccgttctccttctgggcgcagccggttacggtacctatcattactttaactctgcggcaccggccaccccgcccgctgccggaaaaccgggggcttccgcaggcaaaaacagcaaccgtcccggccgcctgccgctggcaccggtgcaggtagccaaagccgtttcggagaccattccccgtaccttgtcagctctcggtactgtgcaggcggccaattccgtgacggtgaccagccgcgtggaaggccagctgatgcaaatccattttgaggaaggtcagaaagtgaatgccggtgatttgctgttcaccatcgacccgcgtccgtttgagatccaactggcccaggctcagggacagctcgccaaagatcaggctacgctcgccaatgcccgccgtgacctgagccgctatcagaaactcgcggccactaatgtgatttcgcaacaggagctggatacccagcaggcaaccgtcaaatcggcggaagccggtattaaggtggatcaggccgctatcgacagcgcgaaactgcaactgacctacagccgcatcaccgcgcctatcagcggaaaaatgggtctgcgtcaggtggataccggcaactttattaccgccgggactgccatgccgctggtggtgatcaaccagaccgcccctgccgatgtgctgtttaccgtcccggaaaatgatattccgctgatccgcatggcgcagcgcactatgccggaactcacggtcaccgcgctgagcaaagataacagcatccgtctggcacaaggcaaactgctgacactggataaccagatagatgccgccaccggcacagtaaaagccaaagcacggtttaccaatgatgatgacctgctgttcccgaaccagtttgtcaatgtgctgctgcaggtcggccagctggagaatgcggtggtgatcccgaatgctgcactgcagatgggaacggaaggcaattatgtctggctgctggaagccgaaaataaagtccgcaaacagattgtggatgtggaattacagaccccggaacgcgtggtgatcaaaagcggcgtcagcgccggtgataccctggtgacagacggaatcgaccgtctgactgacggcgcgcaggtggaagtggtgtccggtgagaaaaaagccgcagccggagataaggcctgatgtccggaaacaatcctgaaacccgtgccggcggcccgtcccgcctgtttattctgcgtccggtcgccaccagcctgtttatgctggcgatcctgctggcggggattgtcggctaccgtatgctgccggtttcatcgctgccggaagtggattacccgactatccgcgtggtgacactctatcccggtgccagtccggatgtgatgacctccgccgtgaccgcgccgctggagcgccagttcgggcagatgtccggactgaaacagatgtcgtcgcaaagctcgggcggtgcctctgttattaccctgatgttccagctctccctgccgcttgatgtggcggtgcaggaagtgcaggcatccatcaacgcggcaaccaatctgctgccgaatgatctgccttatccgccgatttacagcaaagtgaacccggcggatccgccggtactgacccttgccgttacttccgatgccatgccgatgacgcggttacaggatatggtggagaaccgcatcgcccaaaaaatctcccaggtggaaggggtcgggctggtaacactcgcgggcggccagcgccctgccgtgcgggtgcagttaaatgccaatgctgtcgccgcttacgggctggacagcgaaactatccgcaccgcaattaacaacgccaacgtcaactccgccaaagggagcctcgacggcccggcgcgttcggtaacgctgtccgctaacgaccagatgaaatcggcggaagattatcagaacctgattgtcagctacaaaaacaatgccccgatccgtttgcgggatgtggcaaccgtacaggaaggaccggaaaacactcagctgggtgcctgggttaatgataaacaggccattgtcattaatgtgcagcgccagcccggcgcaaacgtgatttccaccaccgataccatccgtgctctgatcccggagctggtggaaaccctgccggaatccgtcaccgtaacggttctgactgaccggacagatgctatccgcgcctcggtcaaagatgtgcagtttgaactgttccttgcgattgcgctggtgatcatggtgatgtatctgttcctgcgcaatatggccgcgaccctgatcccgggagtggcagtaccgctctcgctggtcggtacgttcgcggtgatgtatttctgtggcttttccgtcaataacctgacactgatggcactgactatcgccaccgggtttgtggtggatgatgcaattgtggtggtggaaaacatcgcccgctatctggaaaaaggcgacaagccgctgaccgctgccctgaaaggtgccggtgagattggctttaccattatctcactgaccttctcgctgattgccgtattaatccctctgttatttatgggggatatcgtcggccgcctgttccgtgagtttgccatcacccttgcggtggcgatcctgatttccggtgtggtgtcactgacactgacaccgatgatgtgcgcccggttcctgaaacctgaatccgctcaccgtcataaccgctttaaccgcgccactgaacgcttttttgagcgggtgattgccggttacggccgctggctgacatgggtgctgcgccatcagtggctgacactcggggttgcgttcagtaccatggcgatcaccgtcatgctctatctgtttattccgaaaggctttttcccgatccaggataacggactgattcagggcacgctggaagcgccgcagtctgtgtcgtttcaggctatgagtgagaaacagcaggcggtcagccgtctgctggcggatgacccggcggttgccaatatcgccgcctttgccggtatcgacggcagcaatgccacactgaacaccggccgtctgcaaatcaccctgaaaccgctgtctgagcggactgaccgcgcggaagctatcatcacgcggttgcaggagaaagctgattccctgcccggcgtgaaactatacctccagccgtctcaggatctgacaattgatacccagacctcccgcacgcagtatcagtttaccttacaggcgaattccctggaggagctggatctgtgggtgcctcgtctgatgacagaattagagagcagtgatgccctgaccgacaccggcaatgactggcagaacaaaggactggttgcctatatcgatattgatcgcgacaccgcgtcacggctggggctgaccatgaccaacattgataacgcgctgtacaatgcgttcggtcagcggctgatctccactatttatacccaggccagccagtaccgcgtggtgctggaaaataacaccgcgctgacaccgggcgcggatgccctcagcagcatccgtctgaccaacaaagacggcaactccgtgccgttatcggcctttgccaccgtttcgcagcgtttcgggccgctggcgatcaatcatctggctcagttcccgtccgccaccttctcctttaatatcccggcgggcggttcactggaagcggctgtgaatgcggtgaaatcagcggagcagcgtatcggcctgccgaaggatatcaccacacaattccagggtgccactctcgcctttgaaaatgccctgtccaacaccctgtggctgatccttgccgctgtcgtggcgatgtatattgtgctcggcattctgtatgagagttttattcacccgattactatcctctccaccctgcccactgccggggtcggtgccctgctggcactgattatggcgggtaatgagctggatgtgatcgcgattatcggtattattctgctgatcgggattgtgaagaaaaacgccattatgatgattgacttcgcccttgcggcagagcgcgaacaggggctgtcaccgtatgatgcgatttatcaggcatgtcttctgcgtttccgcccgatcctgatgaccaccatggccgcgctgttcggtgcagtaccgctgatgctcagtaccggggtcggtgccgagctgcgtcagccgctgggggtctgtatggtcggcgggctgattatgagccagatcctgaccctctttaccaccccggtgatttacctgctgtttgaccgcctgtctcactggcgcgataacgcccggtttaccccggaaagtgacaacacgggagcctcatcatgaggctgttcgccctgtttatcgcccgtccggtagccacgacgctgataagcctcgccatcactctgtgcggggcgatcagcttcctgttcctgccggtggcaccgttgccgcaggtggattatccggtgattaatatcacggcatcactgccgggtgcctcgccggaaacgatggcatcgtctgtcgccacaccgctggaacgctcgctcgggcagatagccggggtatcggaaatgacctcctccagttccctcggcagtaccagtattaccctggaatttgagcttaaccgcgacatcaacggcgccgcccgcgatgtgcaggcggctctcaatgccgcgcagaacctgctgccgtccgggatgccgtcgcggccgcgttactataaatccaacccgtccgatgcgccgattatgatactgacgctgacatcggacaccctcgataccggcaaactctatgatatcgcctccacccggctggcacagcgcctgtcacagattgagggcgtgagtgaggtttcggtcggcggcggctcgctgcctgccgtgcgggtggagcttaatccgtcacagctgtttaaccagggggtttccctcgacagtgtgcgcaaagcaatcagcgatgccaatgtgctgcgtccgcagggctcggtatctgacaatgaacgccgctggcagattgacagtaacagtgaactgaaaacggcggaggattatcgtccgctgattgtgcattacaatgacggtgcggcggtacggctggccgatgtcgccaccgtgaaagactcggtacaaaacgtccgcgccgccgggatgagcaacggcaagcccgctatcttgctggtgatccgccgtgaagccggtgccaatattatcgccaccgtggcccgtatccgcgaacaactgccggtattgcaggataccattcccgccagtgtggatctgcaggttgcccaggatcgcacacccaccatccgcgcctcactgaccgaagtggaacgcgcactgaccattgcggtggggctggtgatcctggtggtgttcctgtttctgcgttccggacgcgccactattatcccggcgctggccgtgccggtttctcttatcggcaccttcagtgccatgtatctgtgcgggttcagcctcaataacctgtcactgatggccctgaccgtcgctaccggctttgtggtggatgatgcgattgtggtgctggagaatatcgcccgtcatattgaaaacggcctgaaaccgaaagaagcggcgctcaagggggtcagcgaagtcgggtttaccgtgctttccatgagtatctcgctggtggcggtgtttattccgctgctgctgatggatggcctcgtcgggcggctgttccgcgaatttgccatcaccctgaccaccgccattgctatctcactggtgatctcgctgacactcaccccgatgctttgtgctcatctgctgaaaaaccgcgcagcaccggcacgggagcgtaaacgtggtgcaggccggatcctgttccgcatccagcaatggtacgggcgcagcctgaccgtggtgctggcacacagccgctgggtgctgctgattttcaccggcaccattgctctcgcggtctggctttatatttctgtgccgaaaacctttttcccggatcaggataccgggcggctgctgggctttgtccgcgctgatcagagcatttcgttccagtcgatggagcagaaaatgcgcacctttatgcagcgcattcacagtgataaagatgtcgccagtgtcaccggttttaccggcggcggacgggtgaacagcggatttatgtttatctcgctcaatccgctggatgagcggacagacagcgcccaggatgtcattaacaggctgcgcgtcactctcgcggatgaaccgggtgccaatctgtttctgatcccggtgcaggatgtgcgcgtgggtggccgagagtctaactccagttgtcagtactccctgctggcggatgatttatccctgctgcgtgaatgggagccgaaaatccgcaaggcgctcggcgaactgccgcagctgaccgatgtaaactcggataaagaagataaaggcgcggagatggcgctgacctatgaccgtgatgtgatggcgcagctcggcatcagtgttaatgatgccaataacctgctgaataacgccttcggtcagcggcagatctccaccatttatgagccgctgaaccagtataaagtggtgatggaagtcgcgccgcaatatacccaggatgtcagcgcgctggataaaatgtttgtcatcaataaagagggacaaccggttccgctggcgtatttcgcacaatggcgtccggcgaatgcgccgctgagtgttaaccatcagggattgtcagcggcctcgacgatcggctttaacgtggcggaaggctattccctgtcagacgcagtggcggcggtcgaacgcactatggtggagctgggtgtgccgtccggggtgcgcggtacctttgccggaaccgcgcagctgttccaggagacattacagtcccaggtgctgctgattatcgccgccattatcacggtgtatctggtgctcggcatgctgtatgagagctttattcatccgctgaccatcttatccaccctgccctcagcgggggtcggcgcattgctggcgctgcgcttctttgacacgccgttcagtctgatcgccctgataggaattatgctgctgatagggatcgtgaagaaaaacgccattattatggtggacttcgccattgccgcccagcgcggcgggcaaagtgcgcgggatgcgattttccaggcctgccttctgcgcttccgtccgatcctgatgaccacgctggccgccctgttcggtgcgctgccgctggcgctcggcagcggagacggtgcggaactgcgccagccgctcgggataaccgtggtcggcgggttgctggtcagtcagatcctgacactctataccacgccggtgatttacctgttctttgaccggctgcgccgcaaaaaaaccggagaatccgccgggcaatccgttatcagtacggagggaaatgcatgaaaaccggaataggtcacaaactgtttctcgccatttttgccacctgtatgctggtggtgctgaccatgcatctggctatccgtttcagttttgagcagggctttctcggctatcttcagcgctccgccgaagaccggacggagatgatcgccgatgttgtcgctgaacaatatgccgattacggcagctggtattttctgcgcaataatcagcgcggttttatgcaggcactgcgggcgctggataccgaccgccatatggagcatatggagcgcggctggaaaatgcgtttctggctgctggatgaggatgaccgccgcctgttcgggcacggcccggtcccccccggcgaactctaccgcaaaccggtaaaatacaatgataatatcgtcggctgggtggtgatgccggcggatgacaatatcaaccgtgccgccgaccagagcttttcacatcagcaggcacgcaccagctggatagtctcggcgctggtgctgctggtgactctggtagtcacctggctgctgacgcgcggcttcctgcgtccggtcaaacggctggcagaaggcacacatcagctggcagcgggtaatttcagcagccgcgtgccggttcacggcaaagatgaaatcgcgcagctggccaatgactttaatcagctcgcttccgcgctggagaaaaatgagctgatgcgccgcgactatatggcggatgtctcacacgaactgcgtactccgctggcggtgttacagggtgaactggaagctcttcaggacgggatccgccagccgacaccggaaaccctcgcgtctctgctggcggaagtgcagactctgacaaaactggtcagcgacctgcatcagctgtcattatccgatcgcggctcactctcttaccgcaaagagttatgcaatctgaccgatgtgatcagccggtctatcggcgtattccgccaccggttgcaggaaaaaggtctctccgtcacaacggagctgccggataccctgatgattttcggggatgatgcgcggctcggccagctgttccataatcttctggaaaacagcctgcgttacaccgacagcggcggacagattgtggtacgcgggcggcaggatgaaacacagatccgcatcgactggtcagacagtgcaccggggctgactgaagaacaattttcacagatttttgagcgtttctaccgcagcgaatcctcccgcaaccgggccagcggcggatccggactcggccttgcgatttgtgataaaatcgcggaagcgcatcacgggcagataagtgcatccgcgtccccgctcggcggcgtgaccatcactctgatcctgccccgccctgactgacaggagttgactgcatggaacaaaatgctgaactgattcttattgtggaagatgagccgaaactggctcagttactgacagattacctgcacgccgcccattaccgcacgcactggctggcacgcggcggcgaagttacggcctgggtgcaggaaaataaaccggatctgattttgctggatctgatgctgccggagaaagacggcctgacactctgccgtgaaatccgtcagttcagtgacgtgcccatcatgatggtcacggccaaaaccgaagagattgaccgcctgctggggctggaaatcggtgcggatgattatgtctgcaagccttacagtccgcgtgaggtggtggcgcggatcaaaaccattctgcgccgctgtcagcgcagtaacgatacgtcagaggataaatgtgacaccctgactattgatgaggtgaattatcaggtgcgtttcgggacacaaagcctggatctcactcaggttgaattccgcctgctgcgcaccatggtgtcacagccgggcaccgtactgtcacgcaatcagttgctggataatctgtatgatgattaccgcgtggtcactgaccgcacgattgacagccatatcaaaaatctgcgccgcaagctcggacaattagacggtgaccgcgattttattcattccgtctacgggctgggttaccgctgggaaggcggtccggcagagattattgccgccaccattatctgataaaaaacggcggaatatccgccgtttgttgtttctctgattactgaataacggacggacgcttcagccgtgccaggattttatcaagcgtattttgttcatcctgtaataaatctgcttttgcaatacggaatgtccgatccagctctgctgttctgatatgcagtttcagcgcagcgcggttgtctgttatcacagtgaaagcactcagcggcgcttcatagcagaccgcgtactgccccggggtaaacagcaggttatcaccggcaatcgccagcatcggataatactggatacgccgtgcgttaatcaccagcacaatcgccaccgcgaccataatgccgccgatatccatcccgaacaccagcagtgccacgccgagtattccgtacagcaccgccatgctgatctggcgctgtttattaaatttcagcaggacctcaaacggcagttgtgccagtttcggtacggttttcagtgaacggtagaccacgcggttgtagtcgtagaggtaaccgacgataaagataaagcccagcggaataaaaataataccgccgatcatggcgagaaccaggcccagtttcggctggttacgcaagaatgccagactggccagctgtgcggccatcccgccggtcatcagaattttcacgtacggtaagacttcaatcatctgctgcatctgataatccagttgatcccggtacggctcaagtgccgacggaatataggagataatccccaggaaaatcaggttaagaaccaaaccgatccagactgcaatatgacgtttttccatgtatccacgctgtaacaggctatagtaaatgatagtgcggcagaaattatccgccgcgcaactgaatttaacgaaactatatcaaatcgttatccgatattcatgccattttcagtaattcatttgataccgggcggatgacgcgctagaatccaacgccttgattacgcctccccctccggggaaggttctgacttgaactcagatcggaatacattatgtttacacccgaattactctctccggcgggctcgctgaagaatatgcgctatgcgttcgcctatggtgcggatgcggtctatgccggacagccacgttacagcctgcgtgtccgtaacaacgaatttaaccatgaaaacctcgccaaaggcattcaggaagcccacgaactgggcaagaaattctatgtcgtggtcaatatcgccccgcataacgccaaactgaaaacctttatccgtgacctggagccggtgattgccatgggtccggacgcactgattatgtctgaccccggcctgatcatgatggtgcgcgagcatttcccgcagatggatatccatttatccgttcaggccaatgccgtgaactgggcaaccgttaaattctggcatcagatggggctgacccgtgtgatcctctcccgtgaactgtcactcgaagaaatcgctgatatccgtaaaaatgtaccggaaattgagctggaagtgtttgttcacggtgcactgtgcatggcctactccggccgctgcctgctctccggttatatcaacaaacgtgacccgaaccagggtacctgcaccaatgcctgccgctgggaatataaagtcgaggaaggcaaagaggatgtggtcggtaatatcgtccacaagcaggagccgattccggtgaaaaacattgagccgaccctcggtgccggtgccccgacagacaaagtatttctgattgaggaagcacagcgtccgggcgaatatatgaccgcgttcgaagatgaacacggtacttatattatgaactccaaagatctgcgggctatcgagcacgtcgaaaaactgacgcagatgggtgttcactccctgaaaatcgaaggccgtaccaaatccttctattactgcgcccgtaccgcacaggtttaccgccgtgctattgatgatgctgttgccggaaaaccgtttgacccgtcgctgctgaccacgctggaaggcctggcacaccgcggttataccgaaggattcctgcgccgtcatacccatgactcttatcagacgtatgagtacggttattccgtttctgattcccagcagtttgtcggcgagtttaccggcaaccgcgtgaacggcctggctgaagtggatgtgaaaaacaaattctccgtcggcgacagcctggaactgatgacgcctaacggcaatatcagctttacccttgatgccatgaataaccgcaaaggggaagccaccgaagtcgcgccgggtaacggtcatattgtctatctgccggtgccggatgatgtaagcctggaatttgcattgctgatccgtaacttaccgggcaccagcacccgtaatccgcatatgccggaatttaccgacgctgcggccaccaacgggtaaaattctgaattttcgaatccgatcacaacaatcacgttagttatttcgtagtatcggacaggaaaatgaagaactaaaacgcaacatgtaataccaggaaccacctccttggttggctcaatctcccttgagccaaccttttctttttgtgcccttctcttttttctccgcccatttttcccggcataaaccgtccgtgtttgttatctttaaaagacgtaatctgaacacggagtctgatatggcggaaacgcatatagtggttcttaacggaaaacgtgccggtgatgacggtattcgtcaggctgtccggcacctgcgggaaagcggtgaggacattcaggtgcgggtgacgtgggagccggaggatattccccgttttgtccgcgaagcccgtcagctgaaagcggcaaccgtgattgcagccggaggcgacggcacgattaatgccgtatgcagtgccctgatgacttatccggctgaaaaacgcccggttctcggcattctgccgctcggcaccgccaatgattttgccaccgcagccggaataccggcggataaaaccaaagccctgcttctggccgccaaaggcagtccggtcgccattgatatcggctgtatcaatgaatctcattattttatcaatatggctacgggcggattcggcccgaaaatcaccacagataccccggaagccctgaaaagcaccttcggcggtgccgcctattttctccacggcctgacacgcagcgatttgctgaaagcggatcactgtactatcagctgtgatgatttccactggcaggatgacgcgctggtgattggtgtcggcaacggctgccaggcgggcggcggacataaactgtgcccggatgcgcggatcaatgacggtctgctcaacctgagtattctgccggaacgcaactggccgcgctcactctggaacagcctctttaatgagggtgaggcggaaggcgtcatcatgaagcgcagcacacggatcaccatcagcgcggcacatgagatggtgtttaatctcgacggcgaaccgctgactggtcagcaattcaccttttccgtgctgcctgaagcgatccagtgccggttaccgccacactgcgggttgttatcttaaacacaatccacgacaatccgtgacaattttataacacgctacaggaatcggagtttacataccatgactgatatcgttaagttgttaggcaatgatgcatcatctcttcttgaacacacctgcaccaccattcccaaagacaatctttatctgccgggcgatgactttgtcacccgcgtgatgattgataataaccggccgaataccgtgctgcgctccatgcagtcactgtttaatcacggccgtctggcgggtaccggttatctttctattctgccggtggatcagggtgttgagcactctgccgcagcctcttttgccgctaacccgctctattttgatccgaaaaatattgtcgagctggctatcgaggcaggctgtaactgtgttgcctctacctacggtgtactggcttctgttgcccgccgctacgcacaccgcatcccgttccttgtcaaaatcaaccacaatgaaaccctgagcctgcctgcgcagtatgatcagacactgtatgccagtgttgaacaggctttcgaaatgggcgctgtggctgtcggcgcgacgatttatttcggctcaccggaatcccgccgtcagatagaagaaatctctgcggcctttgaacgcgcccatgaactgggcatggtgaccgtgctgtgggcttatctgcgcaacccggccttcaaaaaagacggggtggattatcatgccagcgcggatttaaccggccaggcaaaccatcttgcggccactatcggcgcggatatcgtcaaacagaaaatggcggaaaacaacggcggctttaaagctatcggcttcagccatactgatgagcgcgtttacagcacactgaccacggataacccgattgacctggtccgttatcagctggcgaactgctatatgggccgtgcggggctgattaactccggcggtgcatccggtaataatgacctggcggatgcggtccgtactgcggtgatcaacaaacgtgccggtggtatggggctgatcctcggccgtaaagcctttaagaaatcgatgaaagacggggtggcactgattaatgcagtgcaggatgtgtatctcgataagaaagtgacgattgcttaaatgcagaacaggccggataaccggcctgatttttttgtgctccctgtttgttccggggagctatacacgagcatataggctgacatacaatcagaagactcggtatcccaatctttttattattaattacttaatctcacaaatagaacagacatccaataaagccttagttttatgatgtcctgtatgcccgaaaaaaatcgtcccctctactttcacgtattttcccaataaggaaatttgtttatcataaacctctgccgatacacatagctgaaacatacatgatgaaccattatcatatagttcacctgtttccatacttctgcctaccaagccaattggggaattcgtgtataatatccagtaaaattcaggcttgtcaccatcatttacagactcataatttggaggacctgcaaaaacctcttctctgactttcccgtataatgttgctgtttggccatccaatagctcttcaggaagtacattcccttttgtaaacatagagttttttgacctaaatatccggaacctagtgttaagtgataacaaaaagcctatcaaagcaagaaatattgagctaataacaccaacaccttgccatatatcactagataaaaattcagtcaaaattattcctctctataattaccaaatatagccttgttcatcatttgtattgttgataattatcgtttcttcttcttccgccctgcctgggcaaaacgctggcggttattatcgctgctgctctctttcttcttctgctgtttgtctgagcccggataaaccggcggagcaactttaattttgttatcgcgcttctgtggttttgcagccggctttttgacttttttatcttcagatgaggatttttcaatcgcatcaaagagttcgaccagctcgtcatccgttaaatcacgccattcccccaccgggatcccggtcaggctgatattcatgatgcgaacacgctcgagtttcgtcacttcataaccgaaatgctcacacatgcggcggatctgacggttcagcccctgaatcagcgtgatgcggaaaacaaacggcgcttcctgcttcactttacattttttggtaacggtaccgaggatcggcacacctgctcccataccacggataaaatcatcggtgatcggtttatttaccgtcaccacatactctttctggtgatcgttaccggcacgcagaattttgtttaccaggtcaccgtggttagtcaggaaaatcaatccctgtgaatctttatccaggcggccgatagggaagatacgggtgctgtgattgacgaaatcgacaatattatctttctcgccttcatcggtggtgctaacgatacccaccggtttattgagggcaatcagcaccagatcatcctgctcccgcgcctcaatcagttgtccgttgactttaaccacatcacccggcatcacctgtgagccgatagccgcacgtttgccgttgatcaggactaatccctgctcaatatagcggtccgcatcccggcgggagcagatgccgctttcgctgatgtatttattaagacgcacagatgaacccgtttccatatcttcccccctgaaaagcgcgcaatatacaccaattatcgtgtgatatcaccaccactgataaaaatggtgaaccgggccatgtccgtgccccacttccaggctgtctgccgccgccagcgccccgtgcagatactgttttgccgcctccgtggtttccgcccagtccgcacactgaggccgcagtgccgccattgccgcagacaatgtacagccggtgccatggctgtttttggtcggaatacgggttgaggtaaagcggtggcggccatccggcagaaacagccagtcagggctttcggcgttatccagatgtccgcctttcagcaatacggcgtttgccccggcggccatcagtgcctcgccctgccgctgcatcattttttcatctgtggcgacggacgttttcagcaatgccgccgcttcgggaagattgggggtaataaccgaaacgtgaggtaataattcagagatcagtaaatcaaccgcttcggctttcagcagcggatcgccgcttttcgccagcatgactgtatccagtaccacgtacggcacaggatactgacgcagtttctcagccacggtgcggatcacgccgccgtcagacaacataccaatcttggcgctgtcaattctgacatccgtcagtaccgcatccagttgtgctgcgacaaattccggcggaacagaatgaacagaatttacgccacaggtattttgtgccaccagcgctgtcattaccgtggtaccgtaaacgcccagtgcagaaaaggtttttaaatctgcctgaatacccgcgccgccgctcggatccgttcctgcaatggttaatgcgttgattctcacctgatatctcctgttttgctgtaccactctgtatagtgaattatacgcatccggtgacaggaaaccaccgcataacaggcaataaaaaaccccatgcccgcaagggcacagggtctgaatttgcgtcagtgatatacactcgtcgttaaaacggctatcaggctgtcgcgttgaccacgctggtaaaaccaactatcaggggcaattttattgccggagataattatgctttagtgacgttggcagcagcagggcctttaggaccatcctgcacttcaaattcaacttgttggccttcagcaagtgttttgaaaccatcggtcatgattgcagagaagtgaacgaacacgtctttgctgccatcagctggagtgatgaaaccaaaaccttttgattcgttaaaccacttaacggtgcctttaagtttagccattgataaaattcctatcctacaaatttgccgataaccggcgatatacaaactagtcgttactgcttaaaaaacagaagcgtacctcgtttacccatttgagttatcacataggacaggtcggaaatcaagcgattttttcagcgggaagatctggtgcacatatttagaaatattaataacatgttcaggtaaatttatacggaaaattgataaccgcttgtgtttaaacatataaaaaaattacaactttgttcctttgctgcaagaacgataagctgccttacttcattatttccggactaagaatctgcctggttccggtagccgttgatattttgtttagatttaagccggattagcagtataaaaataatatgaaatctatgttactataattgttgtctactaattagcatcatttgttatgagcaaaataatcgttttaggataaatgattattgtcacaccaggagtcattcatgaagctttctttaagcacaatcagcgccctgacgctcacctctctgctgatggccgcacagcccgcagcagcacaggaacaggacacacaccaaagtgacagcgtcacaaatgatactgcagcttcagaaggactgtggggaacgtttaaacgcaacgttaccaacgtctggcaatcagaccagtatgatttatatgtcccgttctggacatggcataaccgcctgacctacgacaaagaaaaaactgataaatacaatgaaaagccgtggggtgccgggttcggcaaatcctactatgatgaggataatgactggcacagcctgtacgccatggcatttaaggattcacacaataaatgggagccgattgtcggttacggattccagaagatgtggatgccgcacgggcaggatggtttcaaagccggtgtcggctttaccattggcgtgacggcgcgggatgactatcactatatcccgatcccggtaccgctgccgctggcgtcggtggaatataaccgcctcgcgattcaggccacttatattccgggcacttacaataacggtaacgtcctgtttatgtgggcccgctggcagttttaagcctttttaaacataaaaaaccggggatttttccctggttttttattgcctgacattatgctttcgctgcacggcggcgttcataatagcggtatgtcagccacaggaagccaatccagaaaggcagcaggatcactgaaatccgcagaccatccatcagggcaatcagtaccaggataaaggccaggaacacgagacagatatagttgccccacggataccacagtgccttaaagaacggctccacaccctctttcatcttcgcctgacggaatttcaggttggagatacagatcatgatccagttaatcaccagtgtggtgaccaccagcgacatcagcagcgagaacgcttctttcggcagcaggtagttaatcaggatccccaccgaggtgaccagaccggacagaataatcgagttcaccggtacaccacgcggactgatgcgtttcaggaatgccggcgcattaccctgacgggccaggctgtagagcatgcggctgttgctgtaaacaccactgttgtaaacagagagagcggcagtcagtaccaccacgttcagcacatgagcaatccacagattgatattaccctgcacagaatccgcagcaccaaaggcatggccgatttcacggaagatcagcacaaacggactgacattctcgacaatttttgtccacggatagagagaaaggataacggtaatggaaccgatatagaaaatcaggatacggtaaaccacctgattgatagctttcggaatgctgtaacgcgggttttccgcttccgctgccgccagaccgaccagttcgagtccgccgaaagagaacataatgatcgccattgcgaaaatcagtccgccccagccgtgcggcataaatccgccgaactcccagaggttactgacagacgcctgcgggccgccgttaccgctgataagcagataagcaccaaaggcaatcatgccgagaatggccaccactttgatcatggcaaaccagaattcagtttccccgtaaaccttaacgtttaccaggtttaccaggtttatcagcacgaaaaagatcgccgcagagacccaggtcgggacatcccaccagaatttaatatactcgccgactgccgtcagttccgccatgcccaccagaacaaacattgcccagtagttccagccggataaaaaaccggcaaaaccacaccagtatttatgggcaaaatggctgaatgaccccgtaaccggctcttcggccaccatctcgccaagctggcgcatgatcagaaacgcgataaacccggcgactgcataaccgagcaggacagaaggccccgccatctgaatcgttgtggctgttcccagaaacagccccgtacccacagcaccacccaatgcgataagctgtatgtgtctgttttttaatccgcgcttgagcgtctgctcctgctgtacttctgacattagatcctctgtaacggctatattattattctgcgtcgtgcattactgcatcctgaaaagtttaagcccgttattaaaacatcattttgctgccttgaataccgttagcaacaagataatcagagggaaaaggcaaaactcagcccttatcttacggaaaaaatttcgtaatttcacagattcccagcataaaatcctcacgctgatcacagtacttatcgagcgccgcaatataaaaaaatacaccggcaacaatcagctgcaggataattatgatttttttcatgtttcgcctattttcatctgaattatacccgtttaaaagatttcgttacattccggtcttgtcacatactttagcggaatgagtgtgctgtttcacaaaaaaattcatttcatcagcaggaagcgcataaacagataacaccctgttttgtcataatgaaataaacttgtatacttggaaaaccctgaaactgagccgaaatcatcaatgccgcaagataatcatgtcgcacttgtgtgcgcacttagtaaatggatagaaaaccacacaggtcgtgttatccacctcgaagaactggctgcctattccgggtactcgctctggcatatgcagaagatcttcaaagaagttgccgggatctcgctcggcaaatacatccgtcagcgccgtctggccggtgcggttaacgccctgcgccggagtgaacagactatctttgatatcgcccttgatttcggtttcgggtcgcaatctcatttcacctatatgttccgcaaagaatataacatcaccccttacgactaccgccagaacccggatatcactctggatatcaaagagccgtggcatttcagtcatgactgtaactaaggcaacttaaacaattaataacaaaactatatttagccatatgattttagctatcttattcagcattcagattggcaggacaaatccctgccacagcacaacatacggtgtatccggctgtttttgatgaataacggcaatcttatcgcgcaacaggcggttttattgacatccccccgaaatggcggcataacattttaactgtctgttattttgttgccgctgttttcaggagcctgcatgtccgtaaaacttatcgccattgacctcgatggcaccctgcttaactctcaccatcagattacccccgctgtcagtgctgctgtcacccgcgcaagagagaaaggtctgcatgttatcctgacgtccggccgcccgtttaacggcattctgccctacctccgggagcttgggctggataaagcaaatcattattgcatcagtaacaacggtgcggtgatccatgatgccgaaaccggcgagcccgtaattgaaacgctgatggattttgaggattaccgctattttgaggcgctggcccgggatattaacgtgcattttcatgtgctgagtaacggtgaaatgttcacaacaaaccgtgacatcagccactacaccctgatggatgcgtacctgacacaaacacagctgcactatcgtccgctggcggaaatggacagcgaaatgcagttcagcaaatttatgatgattgataacccgctgcgcctgaatgaagctgccggttatatcccgcaggtctcctttgacagctataatattctgcggacagcgccgcattttgtggagatttcggccaaaaacgccacgaagggacaggctgttgcgctaatcaccgaaaaactggggctgacgccggacaaagtcatgtgtatcggcgatcagaacaatgatatttccatgctggaatacgccggggtaggtgtcgcaatgggcaacgccgctgaccacattaagcaaaaatccggatatgtgaccacctcaaatgatgaggatggtgtggcggcagccatagaaaagtttgtgtgaccgggattatattttttcaaattcccctaattaatgaatttgttccgtttactcttctgagtcttttaatcaacctgcattttgttactattttaacggtttcatttaaaaaataactaaatcacagtatttaattttaacatgtacaggttgttttatgttttcaacaaaagacatgctcgttctcgggatgatggtttttgcgcttttcctgggtgcgggcaacataatttttcctccgatggcgggttatcactcgggaactgactggttcagtgcctccctcggatttatcgtcaccggcgtcgttctgccgtttcttaccctgattactgttgcggtcaaaggccgtggtgagcggctttctgtcgatctgccgcgctgggtttctgtgacattctgggtggcgctctatctgatcctcggctcaacattcgccatgccgcgtgtcaccaacaccgcatatgagctgggttttctgccgctcggtttcgttgagaaaagcaccgccagccatctgatttttgcctttgtgtttaacttcgtttctatgttttttatgcttaaacagggaacgatgatcagtgccatcggtaaatttatgaccccggccctgctgttcctgctggttgccgtggggatcgccgtggtgcgcaccccgctctccccgattaatgaaccgatcaatcagtatgtggattttgcgttcttctccggtattgtcgatggttatcagaccatggatgtgctgtccgcaatggcgttcggcggtattgttgcccgcgcgctggcatcacgcgggataacctcaccgcaggacgtggtggttatcactatcaaagccgggctgattgcggtcggcctgctggctgcactctacatctgtctgttctacctgggtgcgaccagtgatgcggtttcacagacagccaccaacggcggacagattttctcccgctatgtcgatgccctttacggcgcgctcggtacctggctgatgtgcggtatcgtactgctcgccagtatgaccacctttgtcggcgtgaccagtgcctgtgcggatttcttcgcgacattcaacccgcgcctggactaccgtttctgggtggtggtatccacactgctgaccaccattgtctccaccttcggccttgatacactgctgcgcgtcaccattccggtgctgctgctgatctacccgaccaccgttgcactggtgttcctgcagtttgcccgccgcaaaatgcgtaatccgcgttttacctacggctttactgtcgcggtgctggtggtgatgagtgcgttcgacaccctgaataacatcggtctgctcagtgaaaatgtgctggcagtgttacaccggatgccgctgtttaaggaagggatcggctggttactgccgggcgtgattgcctttatcatctcatttgttgccggcaatatgagaccggcaaaaccacagccggatgcggccgcgtaaacacaaaagcccggttatctgaccgggcttttttattcctgccgctgatacgttgtcagttatatttcttcagcaatgctttcaccagtgccagggtttccgcatccgcttccccgttcaccttgtgagagcggaaatgcatctggaacgctttaatcacattgcgggttttcccgtcagccttaccggtcagcggaatctcatagccgtattttttcagtgcctgctgtaattcaccgacactgattttatccgacggatgccggttaccgagaaaacgtttcacatcagaagcatccggccaggcgccgaccccgcgttttgccagatattcccacgggaacatcgggcccgggtccagtttgcgctgcggcgcgatatcactgtgccccaccacattctgcggggcaatgttatgccgcgctatcacatcctgtgccagttttacaatcaggtctatctgcgcagtctgatacggcacccagcgctgcccgacagacattttcacagtgcccggattgacaatttccacgccgatcgagcttttattcaggctgctttccccgcgccagtgacttttccccgcatgccaggcttcattgccctccggcaccaactgcaataccaccggtttaccgtcacgtaccgcagggattgtcggcaccagatactgaacactcaccccgccggcagtcagcacacgcagcgatgcctcatcattcagtgcggtataatggaaaaccagataattattcggtttggataaccacggctctttgatacttcgctgatcaacaatatactcaccgcgatcaatatactggctctgattactgcatcctgtcagtatcagcgcacacaccagacacacactacgccacatctttctttgtcctgtacaatgttatccggcacaatgccggtacagcccctttcccggaaatatcacgaccgcattattcacaacggacataatatcacggccgtgtattatgacgacttcactgcggcagtgctatgctctgaaagcgaatcatcatgatgtttttcagctttttattcacacggagaataaaatggatatttacacctacccgaagtcgcgctcaatccgcgccacctggatggcagaagagctgggtcttgattatcagtgtcactttaccgatgtgatgtctgctgaaaagcaggtccccgggaaaaaccagaaagtcccggcactgtctgataacggtctggtcatttttgaatcctccgctatctgtatttatctggcacaaacctacggcaatggccgcttttacccgtcacatccggaaaaacaggccatcgtaaatcagtggcttgcctatattatttcggagctggaaggtccgctctggatcatactgagacacgccgtggttctgccggaagctatgcggcagccgggggcaattgaaccggcaaaagcggattttctgcgggcaattaaggtgattgagcaggagatcagcggaaaaacatggctgtgcaatgatgatttttctgtggcagatatcttcttatttcatatctcacgctgggcaatgatgctgggctttgtattgtcagaggatttggtgcattacaccggcgagctggaaaagcgcccggcgctgcaacgtgcccgtcagcgggaacaacaggcggctgaaaacgcacgataaaaaatacccgccgcagcgggtattcaataagtcagttatgactgagtgagtttttctcttatgtcatactgttctgacgctgctttcagcccggcaagatctgccgaacaaatcagcggtttcagggcatcaaacttcgcctgcggccagtcataaagagacagcgccagcaattcgcggatggtactttcatcaaaccggctgcggataaaggcagccggattaccgccaacgatagcatagggtgggacatcgcggacaaccacactgttcgcggcaatcaccgcgccctccccgatagtcacaccgggcataatcatggcccgcatgcctatccaggcaccatcaccaatccgggtatcccctttaccggtataagcctcatcaatcatatccggaaacggatagaggctgaaccagtcatggcggtgtgtatgattgccgcccatcaggatcacggcttctgctccgatacagacataatccccgatatacagctcatccactttccagctgagctgccagtcgcggctgatttcatcgccctgtaaataacggacaacagaggcttcaaagccattatcccagcaatcgctgtaataactgtgcgtacctttaatatgaatattcgggtttgtgacggtttcatgcagccgttcgcaaacggaccaatgcttttgtttcatggtaaatctcattatttaatggatagttaccacagaacgctattctgtggtgatgcactcgcgttcaaagcacatcacgccgggttatcctcgcccgtttcagccggggattgtccattattctctcccatacagaaaaacacccgcaaacgcgggtgtcatcatcagttaaccttttgttcgaccagcggttccggtacttcttcccagatgccgtcttcgacctgtttacggatttcaggataaaggttgatatcaaactgcggtaatttccccgttttgcgctgttggttataatctttcgccagcttaaatgcaacgccggataacaacagaatagcaatcaggttagtcaccgccatcagccccatcgagaaatccgccattttccagaccagcggcatttctgacagtgccccgaacatcaccattcccagcgccgccagacgcagcacaaacaaccctttggtgtgtttatgctcgagaaacaccatattgctctccgcataagcgtaattggcaataatggaggtaaaggcgaagaagaagatagctaccgccacaaaggtggatccccaactgccgacaaccgagctcagcgccagctgtgtgatctcaataccgttgatatcgcccggcggattatccagtacacctgaggagagaataatcatcgcggtggcactgcagataaccagtgtgtccataaagacccccagcatctgcacatatccctgagaaaccggatgcggcgggaacggtgcggcagatgcggctgcattcggtgcggagcccataccggcctcattcgagaacagaccgcgctgcacgccgttaatcatggcctgcgccacaccgtaaccgacagcaccggacacggcttcctgtaagccaaaggcactttttattatcagcataaagacatccggcagacgctcggcgtaatgccccattacccagaaagcaaggataagatacgcaaccgccatcaccggtaccaccagctctgccacacgggcaatcgagcgcagaccgccgaaaataatcacgccgcagataaccaccagcagggcaccgacataaccggcatccgcaccaaaggccattttggacgcctgggcaatcgagttagcctgaaccgcgttaaagaccagcccgaacgcgatgatcaggaagacagaaaacaacacgcccatccagcgggctttcagtccgcgttccatataatatgccggtccgccgcgataatttccctggtcgtcccgtgttttataaagctgtgcgagtgtgctttcgataaaggatgttgccatcccgatcagggcgaccacccacatccagaagatagcaccggggccaccggcagtcagggcgatagccaccccggtcaggtttccggtaccgacccgcgcggccaggcttgtacaaagcgcctggaacggcgagatgccggatttatccgatttcttactgtgctttagcacgctgaacatgtgtccgaagtgacggaattggataaatccggtacgaaatgtgaagtacagtccgatacccagtaataaatagatgagcaggtggttccagagcagtccgtttaatgtattaattatatcggtcaaagttatacctcttatattgctgtgctgatttgcggcgaataagccccttaacgaatgacaggtagtatccgtgttgtcatatctgacagtgattgtttaaaaaaaagacacctcttattaagaatcagcccgactttaccataagaaatatttccctgtatatttttttatttcttttttttgttctatttatcagcgttactttttcgcattaatacagcgtttaatccgaactatcaactcaatgaaatctatccaaaacacacataacgcctttgttttcatgatgttataatttttttattttatattcttattcattaactgatactttcaatttagcgccctattctgttttattttctgatattaaaacacatgattaaatcaatattaaaatagccctcttaattaatcgttatttttacagaattggataatttaaagttctcacagagaaaaacagaaatgataataataaaattcagataaaaaattaaaccgtgaaataaaaacgtcggttattacaaaataatataccttttttcattacctgaaacatgcagcaacaccggggatgcccgtcagcctgccgatcactgcttacctcaggcgggctctgattccgggccaaactttgctctgtaacacactcctgtgaaaaaaagctttcaccacagacccgtttccgctaacatagcgttatataatctgttatataccggattgtatacattgctcttaatatatttttgccggtcagctgaccggcaatttttttgtctgctatatctgattacgacgactaaaaatgtgatccgacccggcattcagcataaagacaggaataaccgtgtagtaattttgtcattaatcattattatcagaacagataatcgtgcatttcttcgttatttttctttatttttgctcccttacgggagcattttcttatcagccgggctgtaaaacaccgctgccggcacggaaaatcataaaaattccggtgccggcagcagatccgccatgatttatcacgcggggtgaggtacactacccgcatcagtttaactaatgtaaccgttatgtcctctgcacagattttactgactatctacgcaacaggtggtcttctttcattcattctgacttttttcctgacaaaagatccgaacccgtttttccgcctgctcagttgcctgctgatagccctcacctggccgatgtcattaccggtggttattttattctctctgttctgacaggttttaaacccacaatattcccgctgtcatcaccagacaaaaaagcatcagccgcccccatgtcagaaaactgccatgctgctgccataatgcatttatttcaggtacccgtgtgtagccgcgctgacaaatacggcggcggatatgacgggcaaggaaaagacggaataacaaaagagaaccgcaaccacaaaaagggagggattatgcggctgagttctcctttattgagaataatggctgataacaatcagtccagtgcattgatggctttttcatagatgacattcataaagtcatcattctgctgttcccaatatatttccagcatcacctgaatggcttctttagtaaccggctcgccacttttgcataaaaggacagcggctctgccgattgcctggcaaatttcgccataaacatatgcgtcgctaactcgttctgaaatcatatttgtgcctatttattttaatataactactgcctttccgtctttaattaagacatcagggaattgctgttgactgacaccccggtaagaattatctaaaaattccctgtgatttattatcgtcacattacgtttaatgttcaaagaaaaacatattattccggagaacatttttttgaaaacagcgaaaattaactactatcaaatagttatactaattttgtgttatcattgctacgaattgttacttttcggttgtttattggttaatactatatcatgtgatatgtgctttttcgctatttaaatacataaatttataaatttttacccgcataaataacgtcctttttcccggcaaataaaatatattaaatcacttcgccatactcatttatggattattataatcatataaaatctcaatactccctcaacaggcagtgattcacattattcctttaccgtttgtgtggaaataaaggtatttacacaatatacgcatataagtattaaccgatatataccactcgtttaatacgtagttatgatactttagttaatcattcttttattaataacagtaataaatcagctaagccatactattattttttatttccttatttaaataagataataaaatatttcatcgtaattacgcctaatcataatttgaatacacttattaccggtcaaaaaaacaggttattctgaacagcgggtaaacacacccgatctgccatatttttaaacaaatctgccgtaaacaagacatcttgttttacaatatattaatatttaacatttaccctgcaaaaatcagttttttatagttgtatttctgtacatttccccttatcatccgcgcctttgaatagtgtgtctctcctttatttatctgattgaggttctatgagctctgaccgtattgcgaatccaggcccgctgggcttactgggatttggtatgacgactatcctgctgaatgtccacaacgccggattcttcccgatggcttctgttattctgagcatggggattttctacggtggtattgcgcaggtcatcgcgggtatttttgaatttaagaaaggaaatacgttcggtgcgactgcctttacgtcgtatggctttttctggataagtctggtcggcatactgctgatgccgtcaatgggattcggtgaagcaaccagtcatgaattcctggctgtctatctggcactgtggggtattttctcgttctttatgtttattgccacactgaaagcaaacctgacactgcgcgcggttttctttttactggtgattttatttgccctgctcgttatcggtaatgctaccggtaatgccgcattactgaaatttgccggttatgaaggtattttatgtggtgcgactgcattttatctggcaatggctgaagttctgaatgaacagtatggccggacaattttaccaatcggtgaacgtcacgcctgatgacacgatttctgtataaaaaaacccgttcagtgaacgggtttttttgtctgcaaaacggggatcagaaactcagacccgcgcccagataagcgccatccgcaatacggttttcatgaccgctgttggattcaacttcaatcttacggtaaccggctttgacattcagcggggcaaatactgtccagtttgcaccgacatccgcttctttataagagtcgttaccggaagtcaggcctgacggcgcaccgtaaaactcaccgtaaacacgtactgacggcagaatgctccatgccacaccgacacccggagccacggccatacctttcttacccacttcagggtcgatgtaaaccgctttaccgccgacactcgcggaaaccgggcccagcgggaaagcaaatttggcacgcgcgccgcctaactgcccctggtgatcactgcgcgcccagttaccgtcaaatgacagaccggagtacgggtcacctaagcccacattgatatcagtaaatttcttaccggcttcaacatccatagagattgcgtttgcagcacctgccgcaagcatcagtgttgcagccacagctgctttatattttttcatttttgccaccacataaattcagacagggtttcgggcattttccccgaaactgtcaccgtttgaaagttaatattctgatttttatgtaaagttatctatatccgccatcaataggtcacaccaatccatcaaatcgacacattctttttatgacagtgctatattttataccaagttataaatacagataaaaacaacaatgctcagtgcaatttatgacttaccatgctgattttgcacatcgcgccaatttctgcaatcagtgtcttttttcctttaccgactggagatatgtgatgaaaaagaaaggattaacaacggctgcgggcgcacccgtcgttgataacaacaatgtcatgactgccggaaaacgcggcccgatgctgttacaggatgtgtggtttctggaaaaactggcgcattttgaccgcgaagtgatccctgagcgccgtatgcacgccaaaggctccggtgcgttcggtacatttacagtaacccatgatattacccgttttacccgcgcaaaaattttctctcaggtcggtaaaaaaaccgatatgtttgcccgcttctccaccgtggccggtgagcgcggcgcggcagatgcagagcgcgacatccgcggctttgccctgaaattttataccgaggaaggtaactgggatatggtcggtaacaacacgccggtgttctacctgcgtgacccgctgaaattcccggatctgaaccacgtggtgaaacgtgacccgcgcaccaacctgcgcaatatggcttataagtgggatttcttctctcatctgcctgaatccctccaccagctgaccatcgatgtcagtgaccgtggtctgccgcagagcttccgccatatgcacggcttcggcagtcatacttacagctttatcaacggtaataacgagcgtttctgggtgaaattccatttccgctgccagcagggtattgccaacctgatggatgatgaagcagaacagttaatcgggaaagatcgtgaaagctcacagcgtgatctgttcaatgcgatcgagaaaggcgattatccgcgctggaacctgcaaattcaggtgatgccggaaactgatgcggcaaaagtaccgtataacccgtttgacctgaccaaagtatggccgcatgcggattatccgctgatggatgtcggttatttcgagctgaaccgtaaccctgaaaactatttctccgatgtggaacaggcggcattcagcccggccaacgtggttcccggcattggtttctcaccggataaaatgttgcagggccgtctgttctcctacggcgatgctcaccgctaccgtttaggggtcaatcaccatcagatcccggtcaataaaccacgctgcccgttccacaactatcaccgtgacggcgcaatgcgtattgacggtaacagcggtaatgcggaaacgtatgagccgaacagtgccggtctctttcaggagcagccggatttcagcgagccgccactgtctgtggacggtgccgccgaccactggaaccaccgcgaagataccgattacttcagccagcctcgtgcgctgtatgaattactcagcgacgccgagcatcagcgtatgtttgcccgtatcgccggtgaactggtgcaggcagccgaagaaacacaagcccgccagatagcactgtttaaacaggtgcatccggagtacggtgccggtgtggaagccgcgatcgcaaaactgaaaaaataatcgtgtgataacctgacaaaaccgctgcagtccgtgaccgcagcggtttttttatatgcattcagttggcgtgaaaacgctcctgtgccatctgaatcagcggtgcgcgggtgcgtttgataccaccggccgcatccgcttccggtaatgcatagcaggccgccgggcgcataaatgcaggcagttccgccaggcaccagtcactgaaatgctgacgctgttcgtctgtccagtcatcataatcacggatcagatacaccggtacagcaccaaactcgtcgctgctgaccggtaccaccagacactccgtgatcagcggatagtacataagctgcttttctgtcacttccggctgcacattctcaccaccgcagcagaaaagattatccagccggccgtcgatcaccagctcaccgtcctgcatatggcctttgtcgcgggtcggataccagccgtcatgggacggcagtgtatgcagtgcaccattcagccagacaccggcggcaaaactgtcacctttaaccaggatttgctgttgttcatccaggcggatatctttgccgtgcagcggatgtccgacacccggtttgccgtccgcccgtttggcacagacagttgaggcaaattcggtcataccgtagccgcaccagcagcggatcccgcgggcttccgctgcttccgtcagcgcaacagggatagccgcaccaccgagcaggacatcacgcagcggcggcagcgtgtccggtgactgcagcagacgccagagctgtgttggtaccagagaagcatgagtacatccgcgcagcgattccgccagcgtttccccctccgccctgagaaccatttccccgccctgcagcagccagcgccagagaatcccctgtccggaaacatgacacagcggcagtgataacagccagctgtcatctgcctgatagtccagcagtgaaaccacgccctgcgccgcagccagatgtgcgaccggacggtgggcaatagctttcggtaacccggtggatccggaggtcagtatcagcgttgccagccgtttcggatgcgggatcacgtccggcggagccatgccggtcacagacggatccagtgttttcagcggcagcgcgattgtaccgtcgctccggtcacacacataatccgcatcgagagacgcgaccagttctgtctgtaacccgcgcggtaatgcgggattgagtatcagaatcactgccccgcagcgcagcagcgccagaaaatcgattaccagctctgtgctgtttttgccgcgcagcaccacgcagttactttcccgcaatccctgctgataaaacccggcggcgcgggcatccgcgagagctgccagttctgtccatgtcagcgatgagtccgcacagcgcagcgcagttttatccggtgtctgctgagcatgcgcaacccacggccattgtgctgccgtcattaccattgtcctgtctgagttaattgatctgcggttatcagtgtcagtgtactgcccggccacggacgcaccagctgtgactgcatcagggagagcgtatccagccccggcagggtatccggcgtcagccatccggcaagacgggccagttgtgtcaggccgaaactgctctccaccgaggagctgatcaccgcctgcaacccttcgcggtgcgccgctgtgatcagttcacggcagcgggcgatactgcccgtcagcgtgggtttgatcacaatcgctgccacgccgggctgtgctgttaccgtaaagcccggttcacggacagattcatcccaggcgatagcaataccggtatcctgcgcataacacagggattcttccggcgttttgcacggctcttcgagaaaatcaatccgggtgcggtgctccggtgccacatatttcgcgaaaccatccgctttggtacgggtccagctgcggttggcatccaggcgcagacgcagatccggcaccgcctccagcagtaaattgaccaccataccgtcacgaaccgcctcatacagcccgactttcactttagcgattttctcaccttccatggcatcgagcgcaaggatcagatcatccgggtcaccggtacagagcggtgctttgcgggtattgagagtctgcggcagcgtatcatccagctcagcaagtgcgcagctcagcccgaatgcgactgacggcagcgggctttccgccggattgctgcgctgacaccaggccgcaatccacgcttccgccgcctgttgtgcttcagtgagggtttctcggctgaattccggcagcggggagatttccccccatccttcgcggtcatcttcccgcagacagaccagcagtccgtcacgggttttcaggcgctgattacgcagaataacgcctgcctccatcggcaggctgaaactgtacagtgtagcgtggcgcattacgggttacgtttgaatttagagaaatccggtgagcgtttttcgttgaatgcattacgcccttcctgaccttcttcggtcatgtagaacagcatggtggcattacccgccagctcctgcagaccggactggccgtcacaatccgcattgagtgccgctttcaggcagcgcagcgccatcggactgttttccagcatctcacggcaccagcgcacggtttctttttccagatccgcgtaaggcaccacggtgttgaccagtcccatatccagtgcttcctgtgcattgtactgacggcacaggaaccagatttcacgggctttcttctggccgacaatccgcgccatataagaagcaccccagccgccgtcaaatgaaccgactttcggcccggtctggccgaataccgcattatccgccgcaatggtcaggtcacaaatcatgtgcagcacatggccgccgccgatagcataccccgccaccatcgccaccaccggcttcggacaggtacggatatcacgctgtaaatcgagcacattcagatgatgtgtgccgctgtcatcacggtagccgccgtagtcaccgcggattttctggtcaccgcccgcacagaaggctttttcgccctgtccggtaaaaataatggtaccgatgccgtcatcataacgggcattcgccagcgcactgatcatctctttcactgttaacggacggaacgcgttgcgcacctgcggacggttaatggtgattttggcgataccgtcttttgatttatgaaacagaatatcctgataatcgccggtgcagtcgacccattcaaccggggcagagagcttttcttcgctcggatacatcatagcggtgagttccttaaacagaatgtaatgataaaaatgtccggactgtctccgcaaacgcagcgggatttgcctgatgggtgttatgcccagcatattggatagtccgtaacggaaaatggtgtgcctctgcaatggcgcggaatttactgtcccgctcaccgcagagatagagcagcggcagattcagggcatgcagtttctccgccagctgcggctgatgcccgagcgaggtgtccgacagcatatccgcgatcgcaaaagcattatgatgcagatgctgctctacccgctgctgtcgctgaacctcattgagatcagcaaaaacgccctgacgataccagtcatacagcaccgatgccagcggacgttcacgtaactgttgtgcccagcggttatcatgcagcagccgggcattgcgctcatcgagtgtggcaagcccggggttgccggcttcaataatcagcccgcgcaaccctgcccgctcaccgtatgcagcgtgatacatcgccagccgcccgccgagagagtagccaatcagccagtaatcgtctgcctgatgtgcggccagggtatcagcaatcagctgactgacatgcggaaaattttttgcgcggacggattgtgagccgccgtgacccggcaaatcaatcagtaatgagggataatttccggcttctgctgctgccgtcagccactcttctttatttccccacagaccgtgcagccagaccagccacggaccgggcctgtccgcataacagcgctgtgcggccagaaccgtcattatgctgcctcacggaccagctgctgaaggtattttgcgccctcgtcgccgtttgtcaccacctcaatcacggtagcagagtgctgtgaccaggctttgctgacggcggctttcagtgacggccagtcctgcggggcactgtagctgaggccgaacatctgcgccgcaccggcaaaactgaccgactgcggcatacagtaaaagcgctgacgctcctgttccggtgtcggcagcatggaaaagatttgtccgccattgttgttgacgatcagcagaacaaacggcccggaggtataacgcagcagtgccaggctgttgagatcatacagcgcggagatatccccgacgacagcaagtgccggtttggcactgccgcgctgaacaccggccgccgtggaaatcaggccgtcgataccgctcgcgccccggttgctgtacacaggataaccgcacggcagttgagcaaacgcatcaatcagccggacaatcaggctgttaccggcaaataaaatgccctgcggcggcagcagttccggcaggcggcaggcaatctgcgcttcgccccagccatcgcccagggtttctgtaacatgcgtgttcagtgcccgcgtccattccgccagttgcggagcccacgatgtgcgggtttgtgccggatggtcatccagccattcgctgacactgcattcaaatttgcggccccggtgatttgccggatccagccgtcccgggatggtatccacaatccagtattccggcggcatgcaggcagcctgccactgtaaaagccgtttaccggtcaggcttgagccgaactggatcaccacatccgcctgagccagtacttcgcggtaacgcggggatgccagccagagatccgcatgcggcagcagttgcccggtctgggaaagcacatcactgatcagcggccagccgagacattcagcccactgacgcaactgtttaccttcggcggcctgcatacgtccggcaataatcacaccttttttctgccgccagaagaaccagtcatccacgctgatcaccgatgtacaacgggtctgctgcaaccagggtttatcactctgccaccagttgccgagttgtgcctgccattctttgccggtctgtccgtcatcgtcatacagcggttcggcaaacggacagttaatatgcgctgcgccgtgctgcaggcggttcatgatgtcatcgagggaagagaccagccaggacgccgggatatcaaaaaccggacgcggcaatgccagtgcggcaaacggatgagaagaaaaaataccgggctggcggatagcctggtttgcaccgcagtcaatcagttccagcgggcggtcggcggtcagaaaaacgaggcgttcgccggtcagtccggcctcaatcagtgccggataaagatttgccaccgccgtaccggaggtgacaatcaccgccaccggcagccgggtgcttttcgccagccccagcgccagatgcgcgagtccgcgctcatcaaaatgggtgtgacagataaatttgtcatcggcggcagcagccagtgtcagcggtgttgaccgggatcccggggcgatacagatatgacgcagcccgtgacgcctcagcgcctccaaaatcacttccgcccagcggcggttcaatgcactgtttgacatagctcacctttcctgacctgtagttctccgtagtctacggattgactcaggaaataccttaatgtagttcaataaaccggtggattatttcacggtttctgccccggcaagcagaaaattgcacaatcagtgagcgtcgctctccagcagtgttctcagacccgcggctttattttcaatttcacaccactctgcctgcggatccgaaccggcaacaatgcctgctccggcatacaaatccacccggctgccgctgattttcgcacagcgcagcgacaccgcaaattcactgcgggacgggctgcaataaccgccgctgcccgcataccagtcacggtcaaacggttcgttatcccgtaaaaaggccagcgcggcactgcgcggcagaccggcaacggcggccgtcggctgcagacgctgtaaacaatcactgtcacggggggcatataacgtggcagaaataacacggtaaagatgctgcactttgcgcaggcggatcaccgccgctgcactcacatccagcgcactgactgccccctgcaggcgctgacaaatatcatcaaccaccacactgttttcatgcacattctttttatcagccagaagccattgcgccgcttgtgccgcgcggtcatcttccggatagtttgccactgttcccgccagcgcttcggtatacaactgagctccggccctgaaatagaggcgttccggcggtgaagccacaaacgcagtatttggtccggtggcaagcatatagtgaaaacagcggtgattgcagtcacagctggcctgcataaatgccgccggagagaccggcgcggagagttccagtgcggttttacgggccgtcactactttttccatttctccgccggtaatggctgtcaccgcatccgtcaccagctgtgtccagcccgcttcatccggctgatgccgcgcactgataaccgtgctgttcaatgccggaatttctgtctgccagaccagcgaacgcagaaattctgtggtctcttccgccgggcggcggctgtcaatattgaccagaaagtgtgtttcactgccggatatccgcagttcggcacggggaacaaacagataactgccgccggtaccctgtggcggagacggggtatcaaactgccagctgttcagcccccagatccggatttgactctgtgccggtaaggtatccagcagcgcctgagcatcactgatatgcgtgaagcgacacacttccccgcacactgccgctgtttctgtatcgtcgcggtgctgccagtagaattgcggccagcaggtctgcgcattcagccagccggtcagcgctgacgggggtaataccgctgccagtaatggcgacagagtcaccgcgtactgataaataccatcgggtttatttttgttatgcgttatttcagtacagacctgagaaataaaatcagaaaaaagagtcactgcttgctccggatatgcaaaatgcgcgggtctctgtgattatacggtgagataaaaattattaaaaccatccttcttttttatccttgtcaccgttgtgcattttgaacaattaatgcggaaaccgattctgcttcggccccattcaccacagagttacgtatctcattacagggagatatttatgcacacacaaaccatgccggttgaccggattattacagcggatgaaattgcccccgccacgttaaagttacttctgaatgaagaagacgatactttccggcctgcgggtatattcacacataatgatctggttcatatcaaacgttatattcactacggaatgacccttccccgggaaacagaagatgttattgagtttatcggatacagagatacagagctgcccggttttgagcctcataatattcagcatttatttgtccatattcatcagcatgctctgagctgggagcatgttgaatccatgacaaaacaacaggcgattgatcttgaaattgccggtgccgctattacggcaaccggtaactatattctgaatgccatcaatgaaatgccggtgatccgccgggctgaagttttattacaggatgcaaccgcggataaattaaaagatatcacttacaggaggcaggacaacgttatttccggagaactgacaaaaatattatctgccatgaaagacgatattacggaagaacggcaaaaaacacagcaggtaaaaaatatcatttcccgcttccggctggaattaaccggcggaacagatgaatccgggaatgaaattccgtctctgatttatgaagtcaaacttaaacaaaaaatattattaaaaaaccgggatggtgacaccacccgcgaactgcagtctgagatacgggtcagaaatgaagagattgaaattctgaagcgcgagtacagccagtttgtgaagctctcattctccggtctggtcggcggtattatcgggctgattatcacagggggtatttttggttaccgcgccgaacaggtacgccgccgtaaaaataaattactggaagaagtagcagagctggaagaacaggttatttcccggcaagctatacaacagctgattatcagactggataaagaactgagcacactggacggttattttactgatgttcatgttgccgtcgatcatctcgatttcatgtggcaggtcatgctgacagaaattactgaatccctgaatacctttatgcagataaatgatgcatacagcctcttacaattttctttgcatctgaaaaaaatcacacttccctggcagcgtgttcgtggctatgcaaaagaactcgtcgctatttttgataccgctaatctggcagcataatgaaggagattattatgatatattctgacatcaatcctgaaaacattaccctggcacatattaaagctaaaattaatgatatcagtaagaatattgaagcattgtcattacctaccgctgatctgcatgctcagctccgtgatattaaaaaatggcagacacggatgctgaatattatttcatcagaatccgcaaccatttattctcagctgcatagtttagatccggatgttctatttaatgccctctcttcggataccgaagctaattctttttcactacctcatgaaaaacaaatttacgggtttttgctcagtcagattaataccatctatcattctgtgaatacgattaatactcagtttaatactgaatatgatactaccgcgctcccgttactgcagggcggattattacatcagcagtcctatctggacaaaacgatcaccgtggcactgccggatattgaaaaatttacctgtgataaattgtattgggaggaaaaactggctgtaattattcagtcagaagagattattcatcagcgcggatttcagtcaatcttcggtacaaccacactgccaaccgctgaacaactgaaggatgtagagttgtcctcttccgaacgatttattctcaatgaactccagcgtgttatttccgctgtagtaaatactctgacagaggggctgagctatgctcagctggtcgataccagaacaacagtcagtcaacggatctatgatctcagtaaaattatccgtaatctgaaaaaagacctgaaacacatgcaggatcagatgcaggaagtcagtaatgcgcaggtgttactgcctgagctgcgggaatttaacaaccggatcagtacggtattattgcactggctgcaaagtgtcagtcagtatgagccttatttaagccagaatgtccctcttcccgggctcgatagccttattctggcgcaccgccgctatttttcggtctttatcggtatggcataaaaaaaccgggctgaaatcagcccggtttttctcagtacagatatcagtaactcagaactgcgaatccggtcagtgtgataaacggctgcggccagataccgagcacgaccacgataatcgcggagagcagaaccacaataccgcctgcactcatcgcccagttggatggtgccatacgggccggagattccgaaccgcggatatagaggctgatcatcatacgcaggtagtaatacagaccgattgcactgccgagtaccacagcggctgtcagccaccacagttccgcattcacggcggtcgccaccacgaagaacttaccgataaagccgaacgtcatcgggatcccggccagtgacagcatcattacggtcatgaccgcagccagaaccggcttacgccagaacaggccgcgataggcatgcagggaatccgcatccggcccggtgtacggactggacatcagactgaccacaccgaacgcaccgaggctggcaaacagataaccggccagatagataccggccgtttcttccgccagtttcgggtcattcaccgcgataaaggccaccagcagataaccgaggtgtgcgatcgaagagtaacccagcatacgcttgatgctgttctgggtgatcgccatcaggttaccgaacaggattgaggcaatcgcaatcaccgtcagaacggtctgcaatgtcccggaatccgccatcggcgcgagtaccagcaggcgcagcaccgcagcgaaaatcccgatcttgctggcggttgccaggaaggtggagaccggtgccggagcaccctgatacacatccggtgtccataactggaacgggaacagggacagtttaaagccgataccgacaatcatcatccccagtccggtcagaaccagcggctgatggctctgactgtccgccaggctgcggcctaagccctgaaaagataagtcaccggattccgcgtacagcagcgccatcccgaacagcaggaaggacgaagccgccgctgacatcagcatatatttgatggacgcttccagcgaacgcttctggcggaaggcatagccgatcagcccgaacagcggcagtgtcagcagttcaatcccgataaagaaggacgccaggtgatccgcgcccgacagcaggatgccgccgagtgtggcaatcagtaccagcagatagaactcttctttgttatccgggtaggtctccagccatgaatacgcaaaggtcgtggtggccagtgacgagatcaggataagcccggtgtaaaacatgctgtagccgtcgatgtgcaccagcggtgtcacatccatcgccggctgctgtccgacaaagtacagagacagcagcgcgaggttcagaccaacgacggtcagtgtggcattaataaagtgatcgcgtcgccacgcaatggacagcatcacaaccaccactgtcaacccgataatcagcagtggtgagagtgcgatcagttgttgaggagttattgtcatggcgcgttacaaccctgtatttgaaattgaagcagtgtaccactgctgaatgtttgccatcgccgctgacgaggtatccagcaccggctgcgggtaaatacccagaatcaccagtaagaccaccagcagcatcacgatggaaaattcacgcagattcatgcccgcgattggctcttcagacttcggtgcaccgtaatacgcctgctgcatcatccacagcgcgtaaacggaagcaaacaccagacccgcagaggaaatcacagtgatcagggtgtagctgccgaagctgccgaacaggatcatgaattcaccgacgaagttacccgtacccggcatcccgagcgttgccaccgcaaagaacagtgacagtgccggcaggaatttaatccgcttccacagaccgcccatctgacgcatatcacgggtgccgaggcgctcatataactgaccgcacagaataaacagacccgccgccgacagaccgtgtgcaatcatctgcaccaccgcaccctgatacgccagcatactcgccgagtaaatcgcaatcagcacaaagcccatatgcgacacgctggtgtaggcgatcagacgcttgatatccgtctgtttgaacgccatccacgcgccgtagaagataccgacgacacccagccacatggcgattggtgtgaagtccgcagaggcttccgggaacagcggcagactgaaacgcagcagaccataagcagcggttttcagcagaatacccgccaggtcgacagaacctgctgtcggcgcctgactgtgtgcatccggcagccagccgtgcagcggaaccaccggcatcttgaccgcaaacgcgataaagaagcccagcatcagcatatactgcacaccgtaactcatcggcgtgttcagcagatcttcatacgcgaagctccactggccggtggcgttatgatgaacaatcgccagtgccataatggcaatcagcatcaccagaccactcgcctgggtgtagatgaagaacttggttgccgccccgatacgggttttgccgtcggaaccactgtgtccccacagtgcgatcaggaagtacatcggcaccagcatcatttcccagaagaagaagaacaggaaaagatccatcgccaggaacacgcccatcacaccgccgaggatccacagcaggttcagatggaagaagccctgatacggctggttttcaccccaggaacagaggatagccagcaggccgagcagcgcggtcagcaccaccatcagcagcgacagaccatccagagccagatgaatattgatgccgaaacgcgggatccactccaggaaatactgctcctgccagtccggaacacctttcgggttaactaagctgtagttcccctgcatccacagatacagagaaagaaataacgtgatccccatcgccagcagcgcgatccagcgcggcagctttgtgccgaagcgctcagcctgccagcacagcaggccgccgatgaagggaagtaaaatcagccagggtaatagcatggcgcaatgtgtcccttatttaaaccaaaaacagcagagcgagaaccagcactgcacccagccccatagaggcaatataccagcggacctgtccgttttcactcaggctcagtcctttgttactccagcgggcaaacagcgcaggcagattcatcaggctgttcagcgggtcactctgcagcaaccagcccaccgctttaaacggcttaacaaaaatcgcatcatacaggtcatcaaagccccatgcgcggaaccaccaggccgagaagaagcgtcccggcgcggaattcgcaaccgctgtcaccagcgtacgacggcccagccagagcattgcggccagcacaatccccgccacagcaaccacaccggaaataatttcggtagtcagtttgccgtcagcagaaccggtaagggtttccgccgggaacacgccgtgcagcggttgcgggataaaggcaccggcggcagtggagagcaccatcagcaccagtaacgggaaagtatgggtaaagcctttcaccgtatgcgcctgtgtatgctctttgccgtggaacacgatgaaaatcatccggaaggtatagagcgatgtcataaaggcaccgaccagaccggcgataaacagtgggttctgaccctgaaccaccgcaccccacaggatttcatctttactgtagaaaccggcggtgatgagcggcagtgcggccagtgcggcaccacccaccaggaagcagagatagacaaacggaatttttttccgcagtccgcccatcttaaagatgttctgctcgtggtggcaggccaggatcaccgagccggaggccaggaataacagggctttgaagaatgcatgggtcatcaggtggaaaatcgccgcatcccacgcctgcacaccgagtgccaggaacatataaccaatctggctcatggtggagtaggcaagaacacgtttgatatccgtctgcaccagcgcggcaaaaccggccatcaccagggtgacagcaccgaccacgccgactaaatgcagcacttccggtgataacaggaacagctcatgggtacgggcaatcagatacacacccgcggttaccatggttgcggcgtggatcagtgccgaaaccggtgtcggaccggccattgcgtccgcaagccaggtctggagtggtaactgcgcggatttaccgaccgcaccgccgaggatcatcagagtcgcccagaaaatcaggtcagaaccggccgcaatatgctgcggagccagaaccgccagttcacggaagctcagggtgcccagtttatcccacaggataaacatgccgatcgccaggaacacatcaccgatacgggtgacgataaaggctttcattgccgctgcgccgttggccgggttggtgtaatagaagccgatcagcagataactgcacagccccaccccttcccagccgaggtacatcagcagcatattatcggccagcaccagaatcaccatactggcgataaacaggttggtgtaggcgaagaagcgggaatagccctcttcaccgcgcatataccaggaggcatacatgtggatcaggaaaccgacacctgtgaccacacccagcatggtcagcgacaggccgtccagcaccagggtaaccgggatggagaaggaagcggtatccatccatgtccacagtgtctgctgatacaccccgccgccgttagcgaagaaatccatccccgcccacagcgctgtgagtgccgccagtcccaccgaaccggtgccgatggtggctgacacattttctgaccagcggccgcgtgaaaaggctaataacagaaagccaatcagcggcagcaaaatggttaaaaagagtaagttcatccgcgcatctcactgactttatcaatatccagatcctgacgctgacgatgcaattgcagcaacagtgccagcccgatactcgcttcagccgccgccagactgatggccaggatatacatcacctgtccgtccggctggttccagtagctgccgccgacgacaaacgccagagccgccgcgttaatcatcacttccagaccaatcagcataaacagcagattgcggcggatcaccagacaggtgaaaccgaggatgaagagcacagccgcgagaattaatccgtggtgcagagggatcatgctttttcctccgtgttgcgctgactgacaatatcgccgcccgctttttcgtcacgcccgatgtggtatgccaccaccagacccgccagcagcaggaaggaggccagttcaaccaccagaacatacgggccgaacagactgatacccacctgttttgcggtaaccacctcaccggcgataccgttatctttcagagagctgatgccgtaaatcatcacgccgagcagaactgccgagagcaggcccggccccatccagacagacggggacagccatttgcgttcctggtcgacaaccgcccgcccgaggttgagcatcatcaccacaaacacgaacagcaccatgatggcacctgcgtagacgataatctccagtgccccggcgaaataggcgccgagagcaaagaagaccgcagagagtgccagcagcgaggtgatcagatacagcagcgcatgcaccggattggtctgtgtgatcacacacagcgtagccagaatggcgatcagtccggcgacataaaaggtaatttccatggattttctccccttatggcagcagacttttcacatcaatcggcttggcttcgttgtcggcttcgcctttggctttgcccgcaaccgccatcccggttttgtgatagaagttatagtcaggatatttacccggaccggagattaataaatcttctttttcatacaccagatcctggcgcttaaactcacccagttcgaaatccggcgtcagctggattgcggtggtcgggcaggcttcttcgcataatccgcagaaaatgcagcgtgagaagttgatgcggaaaaattccggataccagcggccgtcctcatgttctgctttctgcagagagatacagccgaccggacataccgcggcgcacaggttacaggcgacacagcgctcctcaccgtccgggtcgcgcgtcagcacaatccggccgcggtagcgcggcggcaggtaaaccggctcttccgggtacatctgggtttcgcgtttatggaaggcatgaagccctatcatccaaatactgcgtacctgggtggcgaaaccaaccactaactctttcaatgtcatggttcaatcaccccttattgagctatcaggatcacggctgctgtcaccagcaggtttatcagtgtcagcggcagacacactttccagccgaatgacattacctggtcataacgcggtcgcggcagcgacgcacggatcaggataaacatcatcataaagaaagcggttttcagcgcaaaccagacaaacggcggcaggaatggtccgtgccagcccccgaagaacagcgtcacaatcagggcggaaactgtcacgataccgatatattccccgacgaagaacagaccgaacttcatccccgaatattcaatgtgataaccgtccgccagttcctgctcggcttccggctggtcaaacgggtgacggtgacacactgccacgcccgcaatcgcaaaggtgataaagccgaaaatctgcggaatgacgttccagactgtgctctgcgagttgacgatatccagcaggttaaaggaacccgcctgcgccaccacacccagaaccgagagtccgaggaacacttcataactgaccgtctgcgccgaggcacgcattgcgccgagcagtgagtatttgttgttactcgaccagcccgcgaacagaacagcatataccgccagtcccgccagcatcaggaagaacaggatcccgatattgagatccgccaccacccagtccgggctgaccggtacaatcgcaaaggccagcagcagcgaggtgaatgccaccatcggcgccagggtgaagataaagcggtcagcgaatttcggtgtccagtcctctttaaagaacattttgatcatgtccgcgaccagctggagcgacccgccccagcccacacggttcggcccgtagcggttctggaacagccccagcaggcggcgttcaccgaaactcataaaggcaccgcaggttacaaccaccagcaggatcacaacggctttgagaacattaatcagcacatcgattaattcaggtgtaaaccagctgctcattgtgccacctcctgcagattaaccaccgcacccgccagtaccggcgaaatgcccggcatacccagcggcagaccgatttgcccggctgtcagctgtgtgctgatacgtaccggcagtgtcagtgcgccgtcagtcagttgtaccgacagaatctgaccttccgccacattcagctgctgtgcatcctgtgcatttaacatcacatagctgtccgtcatacgttcctgaatcaccggcgcccgctgtgataattcctcactgccgaacaggtgataatacggcgcaaccgtccagacattctgctgcggcgcaaatgccgccggaatggtactgaagtaatccataccgccgtctttttcgctgaacagacgcacacccggatcaccgaaacgcagatgaccacccacttccgcctggaatttgttccatgcctgcggtgagttccagcccggcgcccaggcaaacggaatttgctgacgcggtgctgacgggctgttgttcccttccatcgagaaggcaaacgccgtgtctttgtcctgcggctgacgctgctcgtgcacactgacattcgccagcatcgcggtacgcccgctgtagcggtgcggctcacgggccagtttctgtccgcggatacggaatgcagcatccggtgcggtatctttgatcccggccaggtgcggcatctgttcaatgcaggcatcaatcacatgatccagctgtgaccagtcacgggtgttttcattgaggtcattgtacagggcagtcagccagcgccagctttcatgcataatgatggatttgtcgtagaaggatggctcatagacctggaagaagcgctgtgcgcggccttcgtggttgatgagtgtaccgtcactttccgcaaaactgctggcggagaggatcagcgaagccttatccataatgtcagtgcgctgatgatccagcacaatcacatttgctgctgcatccagcgcacggtcaacagcggctttatccgcatggcggtaaaggtcgttttccatcaccaccacggtatccgcgctgccgtctgccagcagagccagtgctttatccagcggctgcgcttctgtcatcgcggcaccaaagctgttggcttccgcgccgacaaaggtcagcccggcatcaatgcctttatctttcagtgcccaggccacgtttgccgcagcctgaatcagtgcatcactgcccggattgctgccgctgataatcagcggttttttcgcaccgttcagcgcctgtgcaatcatttcagcctgtgctttcacatccgcaggtaaatccgtgactgccggcgcggtgttatcaatgatattagcaacagcaaagcccagacgcgcctggtcatccaccggcgcgttgtagtgcagtgccgccacatctgccagacgggtggtatccaccgccgtgacaaacagcgggtatttcgcacgctgaccgatattctggatagcggcaatctgccagtccgccactttctgtgctgcggccatttcgcgggctttgcccttcacggcctgacggacagagagtgccacacgggcagcggtttgagtcagatcttcacccagcaccagcacggcatcatagttttccatctcacgcagtgacggggtgtagataccgccctgctgtaagatttccagcatcatttccagacggtgctgttcaccggctgacaggccgctgaagaagttttccgccccgaccagttcacgcagtgcaaagttgctttccacactggcacgcggcgaaccgataccgatggtgcgtttcgcgtgatacagcatatctgccgccgcgcgttccgcctgctccgcattgatagtaagccagtcatcaccacggcgctgctgcggctgacgcggacggtcatcacggttgacataaccgtaaccgaagcggcctttgtcgcagaggaagtaatggttgatggtaccgttataacggttttcgatacggcgcagttcgccgtaacgctcacccgggctgatgttacagccgacgctgcactgctggcagacgctcggtgcaaactgcatatcccatttgcggttataacgttcagagtgggttttgtcggtaaagaccccggtcggacaaatttccaccaggttaccggagaattcactttccagcgtgccgctttccgggcgcccgaagtacacgttgtcgtgtgcgccgtaaaccccgaaatccgtaccgtccgcataatctttgtagtaacggacacaacggtaacaggcgatacagcggttcatttcatgtgcaacaaacggccccagctcctgattctgatgagtacgttttgtgaagcggtatttgcgcactgaatgcccggtcatgacggtcatatcctgaagatggcagttaccgccctcctcacagacaggacaatcgtgcgggtggttggtcatcagccactccaccacactttcccggaactttttggcttcttcatcatcaatcgagataaaggtgccgtcctgtgccggtgtcatacatgacattaccagacgaccacgggtgtcatcggcattctgatattgctttaccgcacactggcggcaagcgccgacgcttcccagcgccggatgccagcaaaaatacggaatatcaagtccgagcgaaagacaggcatgcagcaggttatccgcgccgtcgacttcatattctttgccgtctacatgtattgtagccatagtcagcatgcttccaaaaggcctgctatgcaggcgttaaacgaaaatccgtaagggatcaccagcgctgcttcagcaggttcggctggatcccggcaatggtctgcacgttgccgtaaaccggctgtacgatccccgcttcaaattcatcacggaaatatttgatcgcactctgtaacggctctaccgcgcccggcgcgtgtgcgcagaaggttttacccggtcccaggaaacgacataattgctctaatgtctcaatgtctcccggctggccttcccctttttctattgcgcgcagaattttcacgctccacggcagtccgtcacggcacggtgtacaccagccgcaggattcacgggcgaaaaactcttcgaggttacgggtcagtgacaccatgttgatttcattgtccaccgccattgccagcgccgttcccagacggctgcccgctttgccgatgtgctcaaaatccatcggtaaatcaaggtgatcctgtgtcagaaagtcggttcccgcaccacccggctgccaggcttttaaagtcagtccgtcgcgcatgcccccggcgtaatcctcgaggatttcacgggcggtggtgccgaacggcagttcccagacacccggatttttcacgcggccggaaaagcccatcagtttggtaccggcatcggtgcttttaccttcactcagaccgatataccactctttgccgtgtgccagaatcgccggtacgttacacagggtttcgacgttgttgacacaggtcggtttaccccagaccccggaactggccgggaacggcggtttggagcgcggattggcgcggcggccttccagggagttaatcagtgcggtttcttccccgcagatataacgcccggcaccggtgtgcacaaacagctcaaaatcaaacccgctgccgaggatatttttccccagcagaccggcggctttcgcttcttcaatggcatgacgcagatgtttcgctgcctcaatgtactcgccgcgcaggaaaatatagccccggtatgctttcagggcgaaggcgctgatcagcatcccttccaccagcaggtgcggcagttgttccatcaggagccggtctttgtaggtacccggttccatttcgtcggcgttacacagcaggtaacggatattcatgctctcgtctttcggcatcaggctccacttcagacccgtggagaaccccgcaccgccgcggcccttcagacccgcgtctttgacaagactggtgatctcatccggtgccatgcctttcagggcgcgttccgcccccgcataaccgtttttgctgcggtattcatccagccacaccggctgatggtcgtcgcgcaaccgccaggtgagaggatgcgtttccgcagtacggcaaaccgttttcactgtcatggatactgctccagtaacgtttcaatggcttcaggcgtaacgtgactgtgggtatcttcatcaaccatcatggtcggccctttgtcacagtttccgaggcagcaggtcggcagcagcgtaaagcggccgtcggcggttgtctgtcccggctgaatattcagtttgcgctcgagtgcggccttgatcccctggtaaccggtgatgtggcacaccacgctgtcacagtaacggatcacatgacggccgaccggctgacggtagatctggctgtagaatgtcgccacaccttccacatcactcgccggaatgcccagcacatcgctgatggcgtaaattgcgccgtcttcaacccagccacggtgcttctgcacaattttcagcgcttcgatagaggcggcacgcggatcttcgtaatggtgtttttccgcttcgatttcggcgcgctcttcgtcactcagcacaaaatcaggttgttttccggctggctgcgccgcattcactgcgccttgcagtgctttttttgcttcagggttcagttcttgcataatcagcgatccacatccgacattacgaaatcgatacttccgaggtacacaatcaggtcagagaccaggctgccgctgatcaccgacgggatctgctgcagatgggcataacttggtgtacggattcgggtacggtaactcatggtgctgccgtcactggtcaggtagtaactgttaatccctttcgtggcctcaatcatctggaaagattcctgagccggcatcaccggaccccatgacacctggaggaagtggttaatcatggtttcaatgtgctgtaacgtgcgctctttcggcggcggcgtggtcagcgggtgatccgccttgaacggcccttccggcatgtttttcaggcactgttccagaatgcgcagactctgacgcacttcttccactttcagcatcacgcggtcatagcagtcgccgttggcggcaacaggcacttcaaaatcgaaattctcatagccggaatacggacgccatttacgcacgtcgaaatcgatcccggtggcacgcagaccggcaccggtcacaccccagtcgagggcttctttcgcgttgtaagcggccacaccgacggaacggcctttgaggatggagtttttcagtgcggcagtgacataggattccagacgtttcggcatccagtcgaggaaatcacgcagcaggcgatcccagcctttcggcagatcgtgtgccacgccgccgatacggaaccaggccggatgcatacggaaaccggtaatggcttccaccacatcataaactttctggcgatcggtaaaggcaaagaagaccggcgtcatcgccccggtatcctgaataaatgtactgatatacagcaggtgactgttaatacggaacagttctgacagcatcacgcggatcacatccacacgtgccggaacttcaatccccgccagtttttccaccgccagcacatacggcatctcgttgacgcagccgccgaggtattcgatacggtcagtgtacggaatgtagctgtgccaggactggcgctcgcccattttttccgcaccacggtggtggtagccgatatccggcacacaatcgacaatctcttcaccgtcaagctgaaggatgatacggaaagcaccgtgagaagacgggtggttcgggccgaggttcaggaacataaagtcctcgttctcgttgccgcgtttcatgccccactcttccggtttgaaggtcagcgcctccatttccagatcttctttctgtttggtcaggacaaacggatcaaattccgttgcccgcgccgggtaatctttacgcagcggatgcccttcccatgtcggcggcatcataatacggcgcagattcgggtgtccgtcgataatgataccgaacatttcccaggtttcgcgctcataccagtttgcattcgggaatgcggaaatcaccgtcggcacatgcagatcgttttcactcagcgccaccttgagcatgatatcgcggttacgctcaatggaaatcaggtgataaaacacggaatagtccgccgcaggcagaccttcgcgatgggtgcgctggcgctcatccgtcccgtgcagatcgaacagcatcacatacggtttcggcagcgacttaaggtaaaacatcacttccagaagctgctcacgcttcacccagacgaccggcatcccggtacgtgtcggctgaaccgtaaatgcgtcaggaccgaacttacggcgcagctcctcaattaccggatcatccaggtaatcgtgagtctgccacgcgggacgctgtgcggtctgcgtattactttctgtcatcattcttcaccacaacagttgttcagggttcaatggacgcaacacattgcaaatattgcgcccggtggcccgaaagccttaaatttcgtccggggagcgcaggttggtcactgcaatccgttcaccgcgttttcgttctttttctgactgcatattggcgcggtaaacgccctgatcacccaccacccacgacagcgggcggcgctcttttccgatagattcctgtaacagcatcagcgcctgcatataggcttcaggacgcggcgggcagcccgggatatacacatccaccggaatgaatttatccacgccctgcacgacagagtaaatgtcatacataccgccggagttggcacaggagcccatggagataacccatttcggttccagcatctggtcatacaggcgctgaataaccggggccattttggtaaagcaggttccggccacaaccataaaatccgcctgacgcggggaggcacgcagcacttccgcaccgaaacgggcaacgtcgtgcaccgccgtaaaggaggtcaccatctctacataacagcaggaaagaccgaagttatacggccacagggagtttttacggccccagttaaccatatcgtgtaatgcatgctcgagtttccccatatacacgctgcggtgaacgtgctgctcaagcgggtcactaacaacctcttgtttttgcaggggataacggtcattctcaccgtttggatcgatgcgggtgagcgtataatccatcttgtgcctcactattgactacggttgattgttattgattttgttcacaacgctcgggtgtttcacctcgcggcgcgaacgtgcaggagtccagtccagcgcgccgatacgtgccagatagaaaagacctgccaataacaccagaataaagatcgcggcttcggtgaaccctatccagcccgattctctgaccgaaacagaccaggcgaaaaggtataaggcttcaacatcgaaaatcacgaaaaacatggcaaccaggtagaactttgcagacatccgcagacgtgcgctgccgaccgagtcaatacctgattcgtaagggagatgtttggcgcgtgcttttgcacggcccccgagataacgggcgcccagcaacataaatgcacataacccgagagcacctaaaagatagatggcaaatgcccagttatgggccagaacttcagtggctgttgacatactcattgcttactcattaaaggtggtgttgcctgccgtacctgcatacagcaccacagcgacacacgagaggaacaactcagtggcggatacaacacttatcgtgatgagaaagccggtaacccggattgttccccgctcttcccaattttgttacaaaccgtcaacttaagattaacccgttgtgcgactttatcgctaaaacgtgtcagtaagtaactaaattgaaaattaactttattatattaacggatacatcgcttttactaacccattatctcaggaaaaacctgtctttccatcggcaaacaggggcaatatttttgatctcaatcacagtttggctgaaaattatttaacaaatgattaattcataaccatttcttaaaacctgagaaaacaggtcaggtttttaacaaagttttattgcaatgtaatgagcactgttaattttggcaatcacagaacatgcgttttgttaacattgtaacaaacaagtaaacaaaactgcgatgcggcgcttaaaacggcatcaaaaacctgaacacggcgtgatgctgttaacatttatatgatatttccgcgtaagggggagaggatacaaaaaagccgggggaaatgatcccccggctgtgtgtctgactgtcacaaattatgtcagtcaggcgtcagattatgacagcgttactccgctgttttgtcatcgtcaaccggtgtgacagtatacggtgtcttcttgttttcaatggcctgatacaccgtcagcactgactcgctctgctcgtcactgttgcggtataaccagtactgaatttccggcagacgcggcagcccttcgctgacgctcagaatacgcaggtcggcattctgcatttccagcggacgggctgtgatcccgacttcggcattcactgctgcgcggacagcagaaagtgatgccgcctcgtaagcaatccgccactgcacccctgcctcatccagggtttcagccgcgagatgacggaacgggttggtttcgtccatcaccaccagcggaatcggctcattaggctgtaactggaaatccggcgcacagtgccacagcaccggcgcggtacgcaaagcagtacgcgggtgatgggcaatacgcgcagtggtcagcgccaggtcaatctcgtgattatccagcataccttcaatgtactggctgcgtttgatgcggacatcaactgccatacgcgggtataccgatgcaatacggttgagtaagaaaggcagcagtgagtcaacggaatcatcggatgcaccgatgcgtaactccccttctgcgtcgttgtatgccagtgatgcggtggcatcatcatttgcccgcaggatctgacgggcgtaacctaacagttgtaacccatggtcggtcagtaatttgttacgaccatgacgcgcaaacagttcgcgcccgacaagctgctcgagacgctgcatttgctgactgacggcagactgggtgcggcatactgccgcagctgccgctgcgaaggtgttcagatccgcgactgccacgaacgtccgcagcagatcgagatccaggtttaacactggacggtttgaatttatcattgttttttcttcactaattttgatttttaataactacctggtgtttattggcgtgaaaaattgcttcgccaacgaagacattaccctatacatcagggtagagtaaaacataactaacactaacaaaaatacgtaactgtgagtaactccattatgtaatgctgcatactaaaacagcagacctgctatacaaacacacaaatttttcgtatcttacaacactgttttccgaatattacgaaataagacaatttgtaactgacgaaaatgcatgctgccaataagccttgctgcaatataaacccgattattctgcaactttaaggtcaaatactctgaaaaccacattatgccgtaaaatcctattagttatactactaataattaccagcatcagggtttaatatataagaaaagattatacaatttcaacaactgctgactatttagtaaaaacactgtattactttaccaattatgatcttccgatagataactttacaaaactcaataccccctcctcctaccagttgtaagctctgaattaatcacaatatcaggcattatactccgccatatcaatgattaaccggcactcccgatcctttccaaaacaaatcctgttgtttttaaccaaaagacgtttactgtcttcaaaaccccgtacggtaagagtagagtgggttataacgggttttacctgataaaatataagattaacgcgctaaggtcctgaacagatgaatataataaagaaatccagcaaactcgataatgtctgttacgacattcgcgggccggtgctcaaagaggctaaacgtctcgaagaggaaggccagaaagttctcaaactgaatatcggtaacccggcgccgtttggttttgatgccccggacgaaattctggttgatgttatccgtaatttaccaagctcccagggttacagcgattcaaaaggcctctattccgcccgtaaagccattgtccagttctaccaggaacgcggcatgcgcgatatgacggtggaagatgtctatatcggtaacggggtttctgaactgattgtgcagtccatgcaggcgctgctgaataacggtgatgaaatgctggtaccggcaccggattacccgttatggaccggtgcggtctccctctccggcggtactgccgtccactatatgtgcgacgaagaacagggctggatgccggacattgaggacatcaaaaagaaaatcaccccgcgcacccgcggtattgtggtgattaacccgaacaacccgaccggggctgtttacagcaaagatttgttacaggagattgtcgaactcgcccgtcagaatgacctgatcatttttgctgacgaaatctacgacaaaattctgtatgacgatgccgtccaccactctatcgccgcaatggcgccggatctgctgaccgtcaccttcaacggcctgtcaaaaacctaccgtatcgccggtttccgccagggctggatggtcctgaacgggccgaagaaacacgccaaagggtatattgaagggctggaaatgctcgcgtccatgcgtctgtgtgccaacgtgccgatgcagcatgctatccagaccgcaatcggcgggtaccagagcatcaatgagtttattcatccgggcggccgtctgtatgaacagcgcaacaaagcctgggaactgattaaccagataccgggctgctcctgtgtcaaaccgatgggcgcactctatatgttcccgaaatttgatgccaagcgctttaatattcacgatgaccagaagatgatcctcgacctgctgttacaggaaaaagtactgctggtacagggtactgcctttaactggccggaaccgaaccacttccgtatcgtgacactgccgcgtgaggatgacctggagatggcgattaaccgcttcgggcgtttcctctctcactaccgtcagtaatcgtttctgctgtcagcggcttcccccgggaagccgtttttatttacatcccgcccggaacaccgcagaatatccgctcttgttatcaacagattgctgccaggaatgttgtctatgagttacttttttgcccacctttcccgtctgaaactgatcacccgctggccgctgatgcgcaatgtgattcaggaaaacgtctctgaacacagcctccaggtggcgtttgtggcacatgcactggccgtgattaaaaaccgcaaattcggcggcacactcaatccggaaaaaattgccctgctggcgatgtaccatgatgcgagtgaagtgattaccggcgacctgccgacacctatcaagtattacaatccgcagatagctcatgagtacaaaaaaattgagcgcatggcgcaaaagaaactgattgccatgatccctgaagagttacaggcggattttgctccgctgattgatgaagacgcgcattcaccggaagatgcggcaatcgtcaaacaggccgatgccctgtgtgcttatctcaagtgtctggaagagataggtgcgggtaataccgagtttcatctggcgaaagcgcggctggaaaaaaccctcgaagaacgccgcagcccggaaatggactatttccgcgacgtgtttattccgggattcagtctgtcactggatgaaatcagccagtaaccgggcaactgtgctttcatcagggcacgccgtcagaacggaaagagtaacgggatcaccgcgatactgattgccataaccaccagcgtaaacggcacaccgattttgacgaaatccccgaaggtataattccccggcccgagcaccagcgtgtttaccggggaggaaaccggtgtcataaaggcagccgatgccgccacgcccaccaccatcgcaaacggcagcggcgacacctgcatttcatgtgccgcctggatagcaatcggtgccatcagaaccgctgtcgcggtattcgagataaacaacccgatagtcgcacacagcacaaacagggcggtcagcatcacatgcgggcccagatcaccggccacgtccatcagcccgctgacaatcagcgtgataccgccggttttctgtaacgccagcgcaaacggcatcatccctacaatcagaatgatactcggccagtggattgaccggtaagcactttccatatcgatacagcggaattttcccatcagcagacaggcaatcagtgccgcgataaaattcgggatttcattggtgaccatcatagccaccatcagtgccagacaaaacaacgcatgcggtgcctgggatgcagcaggtaccaccgcctccgcttccgccgccaggttgagcactataaagtgacgccgtttggtcgccagcacgcggatgattttccagtccccgaccaccagcaggatatccccgagctgcagcggctcatccacaatgttgccgtcaagggcggccccgccccggcgcagacccagcacattcagcccgtaacgggtacggaaaccgatatcccgcagacttttgccgataagctcactttccgggttcagggagacttccgccatgcccacgttgcgggagtgttcggaaaaatattcaccgcgcaggatcatcggctccagcatctgctcggcacaaaattcgcgcaaatccatatcactggcagacatatctatcagcagcacatcacggtcacgcagctccataccgccggtcgcaccgaccatcacccgccggaaacgccgccagcgctcaatccccaccacattcgcgccatagcgggtgcgcagatgcagttcatccagcgttttgccgatcagcggcgaaccgttacggacagcaagacgccgcgcacggccgctcagtttgtagtcgcggatcagatcacgaaaggtacgccgcacattgtcccctgctttttccggctgtttgctgcccagccagtgacgggcaatcagcatatagccgacaccggccagcaggatcagtaatccgacaggggtaatcgagaagaagttaaagcctttgatgccttccatttccaggacactattcaccaccatgttcggcggtgttgccaccagagtcatcatgccgctgataagcccggcgaagccgagcggcatcatcagccgcgaaggggagattttcatacgtgcggagacactgagcacgacagggataaaaatggccaccacaccggtcgaactcataaacgcgccgagcccggcaacactgaccataaggaagaccagcaggcgggtttcaccggaaccggccacccgcaccagccagtcccccatctgataggcaaccccggtacgcaccagcccttccccgatcacaaacagggcggcaatcagcagaatattggggtcgctgaaaccggcgacggcctcattaaccgtcagcgtaccactcagtacgaaagcggtgatcaccagcaacgccacaacatccatccggactttgttggtggtaaataaaacaatggcgataaacagcagggtcagcacccacacgagttccgtattcaccaacgtcctctttcgtcaatgcccggacagcgaacatcctgtctcatcgtttttgttaacgcacagcccgttttccctcatcgtctgatcggtgctgtgcagcggtgttccggctgtcagccgggacggcgggtcagtgttaccgtaccgtccgccgctttctcaacctcaatttctgtcagtgaatccacccgcatagccagttcatccgtgcgcggtgttccggcaggaacatgcacggcaattacctgacaaccggcatccagcccggagagcagaccggcggtggcatcctcaaacacaaaacagtcgcgcggcgccagccccagcttttccgcgcccagcagatagggctgcggatccggtttgccgcgggtgatattatccgccgtcacccaggcatccggctccggcagatttgccgcactgtgccgcggacgggcaatagccacagaaccggaggtgactattgcccacggaatatcaagggaggtcagacgcgccagcagtacctgcgcaccgggcagatccgtgacctgatcactctccctgatctcctgctctgtcacccacgccagttgcgcggcgatttcattctcatccgcatccggcagaaaatggcggatggactcaaccgccggtttgccgtgaataaaatgttttacttcatcctcatccgcaccgatacggcgggcaaacgccagccaggcacgctccaccacatgcagggaatcggccagtgtgccgtccagatcaaacaaaaaaccttttgcagtcagtgccatgcgtgcctcgccgttacggataccggaatattatgcgttaaggatctgattaatttccacttcactcaggtgatactggcgcgggcagttatgccatgcacccagcatacggacatatttatcccacatcggcgtctgggagttaaagccgtggctgccgctgtcaaagtgggtataacgcccttccgtatttaccagaaaacgcacataacttaaataacgtgcttcggtcgccgcatcaaaacctaagaagtggatacggcgcgggtcgatatcttttgcttctttcaggttgtcgaaggagatacgcagtgcgtggtacatttccatcatatcaatcacacggcggcagatttcttccggcagctcgccgaaatcgcgatccagttcgcgcatctgcagcccgaagccgcgctcaataatagtctgctggcggcggtagcgctcggcattatccggatccagcatagccatcattttatactggttagagaggataaggcgttgtgcgttggtcatttccatggtgtatctcctgaaaaagtaatccggggtatggtcagaatcatcgcattactcaaatctataagatagtgaaatacacaccttttttgatctcagcggggaatttcgcccgggtaattatacggagaggaaaaacagggggttacagaagctgaatcgattaataaaggaaggggttcttccgcccgcataaccgggcggaaaacagcgcaacttacaggtcatccagaaaagagttatccagctgcttaaaagcgcgtttcagtaactcggccagtgccatataatccggtgtgccttcaaccggcgcaatcgcaatcccggcttcggcaaattttgcacggatttcgtaaaaccagctgagcagcccggccggtaaaggcgtggcggcgcgccgtcccagccaccataacccctgcagcggcagcgagcaggcaaacagtgcggtggcgactgcgggacctaatgccccgccgagggctatctgccatgtcagggtaaacaccgacagcggcggcataaaacggataccgaactgtgtcgattttatgacacgattctccgggaaaaccggggcgagctgtttcgcggccggccaggtggcggcgtaacgtttaccgagacgcagtgcgcggaacagacccggttttgccggtgtgttatcaggcattatgacctcaatcaataaaaaacataataattaaaatatggctacattcagtcaaaatatttttgtaggattaagtatattttgaaattgctgtcatctgcgggtatgctacgcccgtttaatcacggtgaaataatcctgagttaattattttgtctgatgccgcctttttcaagggcaaaatgtgtgtttttacgccagcaggcctcagacaacagattgcagcgatgatttatcgttcaatataaaaattgcatgatgttaatcatgaacggcgctgaaatattgcgctacgcttagttagattacgttttaaccactgtcttaatacataagacttatccacaacaagattataggtaattccatgtcaagtaagctggtactggtacttaactgcggtagttcttcactgaaatttgcgatcattgaccctacaactggtgatgaatatctgacgggtctggcagaatgctttaacctgccggaagcacgtatcaagtggaaaatggatggtgctaaacacgaagcacaattaggcgcgggcgctgctcacagcgaagcactgcgtttcatcgtgaaagatatcatgggcgacaaacctgagctgtccgcacagatcggctgcatcggccaccgtctggttcacggcggtgagaaatttgctcactctgttatcgtcactgacgaagttatcaaagcaatggaagagtgctctgcctttgctcctctgcacaacccggctaacctgttaggcgtggaagaagcactgaaagccttccctcacctggctgataaaaacgttggtgttttcgataccgctttccatcagaccatgcctgaagaagcttacctgtatgccctgccgtacagcctgtacaaagaccacggtatccgccgctatggtttccacggtacaagccactacttcgtcagccgtgaagcagctaaaatgctgaacaaaccggttgaagaactgaacgtaatcacctgccacttaggcaacggtggttctgttgcagctatcgttaacggcgagtgcgtggacacctctatgggtctgactccgctggaaggtctggtcatgggtacccgttccggtgatatcgacccggctatcattttccacctgcatgattcaatgggcatgagcgttgaagaaatcaacaaaatgctgaccaaagaatccggcctgcagggtctgactgaagtcaccagcgactgccgttatgttgaagaaaactacggtaaacaagctgatgcgacccgtgcaatgaacgtattctgccaccgtctggcgaaatacgtcggtggttatgcaaccctgatggaaggccgtctggatgcgatcatcttcaccggtggtatcggtgaaaacgcagcgatggttcgtgaacacactctggagaaactggctctgctgggcttcaaactggatcacgaacgcaacctggctgcccgcttcggtaacgcaggcaaaatcaccactgacgacagcagcattgccctggtgatcccgactaacgaagaattagtcatcgcacaggatgcagcccgtctgactgcataatctttgctctccgccggcccccgccggcggatttattttgaacaccgaattgtgaaaaaataagaggttcatgtgtcccgtactattatcctcattcctaccggcaccagtgtcggcttaagcagcgtcagcctcggggttgtccgctcaatggaacaaaaaggcgtcagcctgagtttcttcaaaccggttgcacagccgcgccgtgcaggtattgaagatcagaccacccagatcttacgcgctcactcttccctgaagatggcagagccgctggatatggattatgtcgaaaccatgctgaccaccaatcagaaagatattctgatggaagaaatcgttgcccgttaccacgagcatactcagggtgcggaagtgatcctgatcgaaggcctggtaccgacccgcaactacccgcatgctcagtccctgaactacgatattgcccagactctgggtgcggaaatcgtattcgtgacagcaccgggcaatgacaccgcagcggaaatcaaagagcgtctggaactgatccgcaatgaattcggtggccataagaacaccaacatcgccggcgtgatcgttaacaaagttaacgctccggttgatgagcagggccgtacccgtcctgatctgtctgaaatctttgatgattcatccaaagccactatcgctcacctgagcgcagatgatctgaaatccctgcctctgccggttgtcggcagtgtaccgtggaacttcgaactgattgccacccgtgcaatcgacatggcgaaccacctgggcgcgaaaatcatcaacgaaggcgacatcaaaacccgccgtgtgaaatctgtgactttctgtgcacgcagcattcctcatatgctggagcacttccgtccgggttctctgctggtgacctctgctgaccgtcctgacgttctggtttctgcctgcctggcagcgatgaacggcgtggaaatcggtgcgatcctgctgaccggcggttatgaaatcgacgacagcatcgctaaactgtgcgaacgtgcgttcgaaaccggcctgccaatcttcactgtgaacaccaacacctggcagacctcgctgaacctgcaaagcttcagcctggaagtccctgctgatgaccgtgagcgcattgaactggttcagaactacgtggcaagccacatcgataccaaatggatcgattccctggttgcggattcagagcgtccgaaccgtctgtcaccaccggcattccgttacctgttaaccgaactggcacgcaaagcgaaaaaacgcgttgtcctgcctgaaggtgatgagccgcgtactatcaaagccgccgctatctgtgctgaacgtggtctggcgacctgcgtactgttaggcgatccggaagaaatccgccgcgtggcagctgcacagggggtgactctgggcaccggtatcgagctggttaacccggctgacatccgcgagctgtatgttccgcgtctggttgaactgcgtaaaaacaaaggcatgaccgaagtcgttgcccgcgagcagttacaggacaacgttgtactgggtacaatgatgctggagcaggataaagttgacggtctggtttccggtgcggttcacaccactgcgaacaccattcgtccgccgttacagttaatcaaaactgcaccgggcagctcactggtatcttccgtgttcttcatgctgatgcctgaagaagtgctggtctacggtgactgtgcaatcaacccggatccgaaccctgaacagctggcagaaatcgcaattcagtctgctgactctgtgaaagcattcggtatcgacccgcgtgttgcgatgatctcttactctaccgggacctccggccagggtgacgatgttgagaaagtccgcgaagcgacccgcattgctcaggaaaaacgtcctgacctgtgcatcgacggtccgttacagtacgacgccgccgtgatggctgacgttgcgaaaaccaaagcaccaaactctccggttgcgggtaaagcaaacgtcttcatcttccctgacctgaacaccggtaacaccacttacaaagcggttcagcgttcagcagacctggtctctatcggaccaatgctgcagggtatgcgcaaaccggttaacgacctgtcccgtggtgcgttagttgacgatatcgcatacaccatcgcactgactgctattcaggcagcgcaggacgaagcgaagaaaaaataagttctgctgactgaaaagttacagaccataatcccggccgggtttccccgccgggatttttttatgtatcctgtcaaaaaaaccgccttgcggcggttccctgtatttcagcagaaaaattactgccgcagctcgtgcttcacatgtgccgtctgcaactgaccatgtaccagttctgataaatcctgcagagataatgattttccctgccagatccggacaccggccatcataatcatcagcttctgctttttggcatcgtatttaaagaaacggctttttgctgccatacccggtgccggtgcaccatcagccacatgaagtgtgagtgtcgccacaccggaagtttccgcgatgtcataatcaacgatgtagtgcagcggatacggctgtgtcagcttttcactgaccagttgcccgtggcggaacgcaaacagtggtgctttgcctctgtcgcggtacataaaggccacaccccagaacagcagtaacagccagaagccgtgaaccgcaccggaagctaccagatcttccgcgccgagtttcaccgtggcaatacccatcccggccgcaaccaccagaccaaagataaacatcatccggaacattttccgccgctcggtgatgatcacctcatctgccgcgtcagattcatgcagcatcgtttccagtgcttctgtccgctgtgtggtgtactccgcgaccatgccggagagtgacgccgtcagcatcatggaaatcgctttggcatccgtgaacaggtccgcgatattggcgtaatcatccgactgcacttcacgggaagcgtcggccagcagctcatcactgagatcctgagacagtgcttcgatacgggtacgggtctgcggatgtgtgtcgctcgggtgactggttgcctcattcaggaactgtccggcttccggcacaccgcgctcacgcagacgcgccatcaccacaggcagtaaatcatctgttttcagggtaccttcatacaactcacccagagtttccgaaatcacctcactgaccgcagagatacgcagcagtgatgacgccacagccgccggtgagctgaccgatgcccccgctttatccgcttccagctcacggatacggctccagtgactgacggcaaaatcaaactgctcgaggaaaaagatcccgagatacaccgacgggctcataatcactttactgtagtaatcctgcacctcgttggccaccagcgaaatactgtggctcattccggcatagattggcgcaaagttcagactatacgtggtatcttcgccggtgaaatgccccagttcgtgcccgataaccgcactggcttcctcacggttgagcagtgcggaatagagcagcggaaagtacagcgttttcccttcaatcagctgattttcattcaggctgatactgtgggatgtcacataaaaacactctgtcataccaacaacaatatgatccggcgacggcgtgccgactttcgcggcaatctcatccacccactgccacagccccggtgcttcctcccggctgacggcatgccctgtcacatccgacggttcgctgcggaacatggcaaaactcttgcgcagcttaaacagccctttgatgatgtaccagataatcagcaggatactgatcagaataaagatcatgattttcgcaccgccgccgctcagcacgaaattaccggcgaaccacagcgcttcatacgccatcacacaaatgatgctcaggccgaccagcgtcatctgcccggtcaggataaacggcagcattttgcggcagcgggcaaagacgttcagcagcgtatcgcgggagcgccgggcagcccggccgctgctgatgcagagataaatcgcccctgcgccaaacagcagtgataaaatcccggtggcgacagttcccagactgacacccgccctggccagaatcatggcaatttcgctgctgtatttattcagatcacggttaatcatccccagttgctgaccggcagacacagtttccccgtcatcgtaggtaatctgtgtattcagatcttccgcaatcagacgctgaagctccgctttttctgacataatatactggtaagcctgatattcatcactgatgcgccaatactgaaatgcaccccatgcggtgagcagcagcggtaataacaacagccatcctgctaatttatttctcatcattattctcgttcaggttgtattttatcatcttccgtctatttccggataattcttattaaccgggctttgttatttaatattttttaataaagcataaggcctattacataaaatcattgtaattcatgccgttaacggaagtttttatggtttgatattattatctgtattcagaacggcattctacaggaaaatgattaaagccagaaaccggaataatacaaattatactgaactgtctctgataatattctattttgccgatatatttactgcctgcgttttatttcaccgtattttaaatataaaaaagcctgcatattgcaggcttctccggtttttattcttttttattcgctgtcgctgctcatttcagcttcaggcgttgcaaccggcttctgccgctctgccggggtataattctgattattccgggtcagccagagtgagagtgctttcagtgaatcggccgtaaattcgtcacagcgggcagtgatttctgccggggtcagccaggtgacttccgatacctcactttcctgaagcgcgaacggcccgtgagtcacacagctgaataacccgccccagacacggcagaccggctcttcataataaaacagaccgtgttcggcaaacggcacaccggcgatcccgagttcttcctctgcttcgcgccgggcagaatcgagcatcagctcgccctgctgcaccacgccgccggcagtggcatccagcagacccgggcagtagtctttgtgctcagtccggcgctggacaagaatttttcccatgccgtcatgcacaacgatgtaggttgcccggtgacgcaggttttccgcccgcatctgctcgcgggtcgcctggccgatgacatcattattctcatcgaccacgtccacccactcgatagcgctatcttgttccatcctctaaccttttcttttttatcagcattacggatgctgtttctgttttttcagtgacacacgctgttaatccgcgggccgctgctttataccgcttttatataccaaactaataatgatagtgtgccattatggtcattgaatcagtatatcaagaattgatagcggttctatgattgtttttctttcttgccgatcacatcccccggcggcaaaaactgctatagtcagagaaacctaccggcagaaggagcatctatgcgtattctgatcacaggcggcaccggacttgtcggcactccgctggtgcaggcactgattgcccggaaatatcaggtggtggttctgagccgctcaccgcagaaagtctattcccgtttttgctcagccgcagaaaacattaattcactcaatgatataacacatctgaatgacatcgatgcggtgattaacctcgccggtgagcctatcgcggataaacgctggagtgaagagcagaaaaagctgttgtgtgagagccgctggcagataaccgaacggctcagtgagcttatcaatgccagtgaaacgccgccggcggtgtttctctccggctctgccgtgggctggtacggtgatcagggacaatccgtcgtgacggaggatgacgagccgaatcaggaattcacccacactctgtgcgaccgctgggaatccctggcgatgaaagcacagagtgagaaaacccgcgtctgtctgctgcgcaccgggattgtgctctccccggaaggcggcgcgctggcgaaactgctgccggtgtaccgcgccggtcttggcggccctattggtaacggtcgtcagtatatgccgtggatccatatcagtgacatggtcagcgccattctgtttctgctcgacgatcccgcacagaacggcccgttcaatatgaccgcgccttatccgtcccataatgagcagtttgcagcggtactggcgcagatccttcaccgcccgcatctgctgcgtgttccggcatttgtggtgaaggcgctgatgggagaagcggcggtactggtactcggcggtcagaatgccctgccgaaacggctggaggaagccgggttcggctgtcagtttattaatctggaagaagcactgcgggatttactggacagtccggcggactattaatgcagagcccggccggaaacaaacggccgggtgattcagattacggctgtgcagagcggggatttttcgccccgctccagcgggtaaataaatcttccggtaatgcaatatcaaactgatcgagcacacggttgaccgtctggtcaataatatcctgcaccgtttccggctgatgataaaacgcaggcatcggcggcataatcaccgcaccgatttccgccgcctgtgtcatcagccgcagatgtcccagatgcagcggcgtttcacgaacgcccaacaccagtttgcgcccttccttgagcaccacatccgccgcgcgggtcaccagggtgtccgtgtaactgtgaacaatccctgacagggttttcaccgaacagggcaggataaccatccccagtgtcctgacagagccggaagatatacaggcggcgatatcacgctcatcatgtaccacatccgccagtgcctgcacatcccgcagactgtacgccgtttccagtgccagtgtctgacgggccgcctgactgacaatcagatgggtttccacttccggcaccgtttgcaggacctccagcagccgcacaccatagacagcaccacttgcgccggtcagccccacaatcagttttttcataacatcacctgacaaaaaagagattaaccctcattatatatctcaaggttctcaatttcgttatgatcccgcaactttaattcatcatccttacgtaagttttccacatagtcgagataatcctggtcgatatccttggtgacatagataccatcaaacaccgatgcctcaagaccccggatatccggattctcttcacgcaccgcatcgataaggtcactcagatcctggaaaatcagggcatccgccccaatcagacggcagatttcatctgcttcacggccatgtgcgattaactcgttggcattaggcatatcgatgccgtagacattcgggaaacgcacttccggtgccgcagaagcaaaatagactttcttcgccccggcttcccgtgccagttccacaatctgctctgacgtggtgccgcgcacaatggaatcatccaccagcagcacgtttttccctttgaattcggtgcggttggcattgagtttgcggcggacagattttttccgctcctgttgccccggcatgataaaggtgcgtcccacatagcggtttttcacaaacccctgacggtacggcttgttcagcatatgagcgatttccagcgcactgtccattgaggtttccggaatcgggatcaccacatcgatatccaggtcttcccactcgcgggcaattttcgcaccgagtttctgccccatacgcagacgggcgttatagacagagactttatcgataacggaatccggacgggcgaaatagacaaactcgaacagacacggtgtcagtgacggattcgccgcacactggcgggtgtagagctgcccggtttccgtgatatacaccgcctcacccggcgccacatcccgcagatattcaaaaccgagggtatccagtgcgacactttcagacgcgaccatgtactcttcacggccatcaaccagagtacgcttgccgagtaccagcggacggataccgttcgggtcacggaacgccagcagaccgtggccgataatcagtgccacacaggcatacgcgccgcggattttggtgtgcatcgcgctgacagcggcaaaaatattatccggctccagcgggtgagcatcaaagcgatccagctcatacgccagcacgttgagcagaatttcagaatcggaggtggtattgacatgacggcgggctgtttcaaacagctgatgtttcagcgtgtgcgcattggtcagattgccgttatgcgccagagtgataccgaacggtgaattgacataaaacggctgtgcttccgatgcactggagctgcctgcggtcgggtaacggacatggccaatcccgagtgtgccctgcaaacgcagcatatggcgggtttcgaaaacatctttcaccagtccgttggctttacggagccggaaaccattgttactgtcaatggttgcgataccggctgcatcctggccccggtgctgtaacaccgtgagcgcgtcataaattgattgattgacttgcgtaaaaccaacgataccaacaataccacacatgtagttttttcctcatcagccgggcggagaaggaaaattctccggcaggaaacttgacgcattctggaggtagtcaaagaaccacctgataacatgactgaattgggggatgagttgtgactgctgccagtcgctgctctgactcatctgcgtaaagctgtcgaggaagaacaaaattgccgccacgatcagcaccccgcgcagagcaccaaaacaaaccccgagaacacgatctgtgcctgataagcctgtccgctgaaccagtgaaccgataacatggttaatcaccgagccgacaatcagtgtcgcaacaaataaaatcgcaatggcgattccgttgcggaccagcgggtcatcaaagcgcgtaaaatagtccgccagcagcgggaaaaactcgctggccacataaaacgcacagacccaggtcactaacgataaggcttcgcgaacgaaaccacgaaccaggctgactaatgccgagaaagcaataattgcaataattgcgtaatcaatccaaaccatatcactatccaaattgatgccccggcatcagtgacgggcgcattctaacagaaaacgaaaacgtttgcgtaacggatttttgctccatccgaaaataaattgcggcgaaataaaaaattataatcgccgcaaagagttaactgattttattaacggatattgctaattccttaaatttgctacggtttataagactgcacccggccatccagcccggtaagctgtctcagttcccccagcgaggacttcagctcggcctgcgaggctgacggcccgaccataatcagcgtcagcttgccacgcggcacggtatacacctgataaccggataaccgcagtgtggcgacaatctcctccaccttacggacattagataatgcgcccagctgcacaacataagcctgtccctgcggcgctttttccggtttgggttccggtttcggctcaggttttggttccggctcaggcactggttttggttcaggtttcggttccggcttaggttcctgtttcggtggcggttgtttatccgggatcaccaccggcggcagcggatccgcacccggcggtacattggaggtggtactgccgcccgcagatgcttccgcaggagcttcttccgtcccggtttgtgccgcttcggtaatcatggcgctggatgccccttctgacggcatcgtcggcatggtctgattgatcggattcaccgcatcaatctcatcctgctccccttctttcgggataagcgggatggctgcgaactggtcttcgttatatttcttatcgccgtccagcagcaccggcaggacaatcacacccaccgccaccaggataatggttccgactaagcgattctgaaatttactggccacccgcaccttccttcgctaaaacatccataacatgagccaccgtgtggaatgacccgcacaccaccacgatatcctccggtgaagcatcacggcgcgcctgttcccaggcactttccacatcggcaaactgctgcgggttggtcagatgctccgccagctgttctgccggggctccgcgcagttcggtcagcggcgcgacataccagtctgtcacctgctcacccagcacagccagggtacctttgatatctttgtcgcccagcataccgatcacggcacggacacggctctgcgcagtacgcggtaactgtgccagttttgagaccagataaccggcggcatgcgggttatgcgccacatccagcacggtcagcggttgctgtgagacaatctgaaaacggcccggcagttgtgcctgacgcagcccggtatcaatcgcctcacgggtgatggcacggccggttttgtctttcacctgacgcaggttgtggatcaccgcaagggcagtcgcggcatttgccagcggcacattcggcagcggcagattgtcgagggtttcatcctcacactgccacgtccagtggtcgccctgctctttgtaagaccagtcatcggcacggcagaacagcgaggtttccagcttgtttgccacgtcagcgatggtataaggcgcatccggctcaccgatcaccgccacacaatgcgggcggaaaatcccggctttctcacgggcgatatgctcgcggtcagcaccgagccagtcggtgtgatccagcgcgatactggtgatagccgtgatatgagaatcgacgatattggtggcatccagacgcccgccgaggccgacttccagaatcaccacatcaaggttggcttcgcggaacagctgcagtgctgccagtgtgcccgcttcaaaataggtcagtgtgatatcgccgcgctgcgcgtcaatatccgcaaagacacggcagaaatccgcttccggcgggttttgcccctgaatccggacccgttcggtgtaattcaccagatgcggggaactgtacaccccgacccgcaaccctgcggccagcaggatggattcgagcgtgtggcaggtggtgcctttgccgttggttccggaaacggtaatgactttcggggcgggatagcgcagattcatgatatccgccaccgcaccgacacgttccagtcccatatcaataacctgcgtatgcagatcacccagataagaaagccacgtcatcatcgatgacgcggctgtcggtctttctcgcttatcagacatcgtgttttttgacatcagtctctgtttcagaagataagtcggtatcaggttcatccgcggtcaggatttcaatgatttcaccttcctgcgggaactgatagttcgtcagttttgacagaatttccgcgacggtatcacgcatttccgggcggcggacaatcatatcgatcgcccctttttcaatcaggaactcactgcgctggaatcccggcggtaatttctcacggacagtctgctcgataacacgcggaccggcaaagccgatcagagctttcggctcggcgatattgatatcacccagcatagccagacttgcggagacaccacccatggtcgggtcagtcagcacagagatatacggcagaccgcgctcctgcattttagccagagccgcactggttttggccatctgcatcagcgacatcagcgcttcctgcatacgtgcgccgccgcttgcggagaagcagaccagcgggcagttatcttccagcgcctgttcaaccgcgcggacaaaccgtgcaccgaccacagaggacatcgaaccgccgataaaggcaaactcaaacgccgccgcgacaaccggcatggttttcagggtgcctttcatcgcaatcagggcttctttttccccggttgttttctgggcggacaccagtctgtctttgtattttttggaatcacggaatttcaggacgtctttcggctccagatcagttcccagttccgtggtgctgccttcatccagaaacgtcagcaggcgcgcacgtgcagggatccgcatgtgatgatcacatttcggacacacctcaagattacgttccacctcctggcggtacagtacctgaccacaactgtcgcacttcgtccagacaccttcaggaatgctcgccttgcgtgtctggttcattggggtcttattcagaattttttcaatccagctcattaatgacctttccgtctgaaatctggctcagccagtgtaattattatctgccattaaaccacattgcttatgcactgtggataaaaaactgctcaaaccactcaggcgtcatcacgtttctgtgcttttttcgccgcacggcggtgacgccatacctcgataataccgggcaatatggagatgaaaataatcgccacgataagtaatttcaagttttcctgcacaatcttcgtttccccgaagatataccctgcataggcaaataataccacccatacaattgcgccgataacgttaaacatcgcaaagtggcggtaagacattttactcataccggcaacaaacggggcaaatgtcctcacaatcggaacaaatcgcgccagaataatcgctttaccgccatgagtttcaaagaacgcatgggtcttgcgcagatagctctgacggaaaattttcgagtccggattgcggaaaagccgctccccgaaaaagtggccgatcgtatagttaactgcatcaccgataatcgccgccgtaatcatcagcagcaccatgatatgaatattcaggtcgttggtcggcagtgccgccagtgtccccgccacaaacagcagcgaatctcccggcaggaacggcgtgaccacaagcccggtctcacaaaacaagatcaggaataaaatcgcataaacccagattccgtactgcgccaccatctcctgcatatgcaaatcaatgtgcagaataaaatcgatcagaaatttaatgtattccatatttcaccccgccggacgcggctttctgcttatccggccaataaattaatctgccaggaaaagcggccccatcgccggtgacggcagggcaaattcttccgggtaatccactgaaaccagatacaaaccttccgccggtgctgtcgccggtgcctgtgtccggtctttcagtgccagcaactccgccatccggctgaccggtaaattaccgcagccgacctccagcagagcgccggtgatattacgcaccatatgatgcacaaaagcattggctttgatatccacaatcacatactgcccctgacgggtgacgttgacatgcatcacattacgccacgggcttctggactgacactgcgccgcgcggaaagaggaaaaatcattctcccccagcaggctctgtgccgcttcatgcatccgcttttcatccagcggataatgaaaatgggtcacacctttactgaggatagccgggcgaaagcggtgattgaaaatcacatagcggtaacgccgcgctgtggcactgaaccgggcgtgaaaattctccggcacggtcttgacccagcgtaccgcgatatccggcggcagatgggtgtttacgcccatcgtccaggcggcatctttacggacagctgccgtatgaaaatgcaccacctggccggtggcatgcaccccggcatcggtccggcccgcacagaaaaccgagaccggctctgcagccacttttgacagggctttttccagacagccctgcacactcgcgacttctgactgacgctgccagccgtaataacggctgccgtcatattcaatgcccagcgcgatcgtggttttaccctcttccgccggtaaaatcacctctgacatcagtaaaactgctcctgcgtcagacgctcggcaatttcgactgccatcagtgcgccgccaaactgtacgttatccgccactgaccagaagtgcagaatttccggaataccgtaatcattacgcagacaaccgatattcagcagatgattgccggaggcatccgtcacctgagtcgggaactcctgctcttctgagagctgaatatcctctgcccgttccagttcatcacgggcttcctcactgccgagcggacgcagtgtttccagctgcacgatctgcgcgttgccgtagaacacaggggactgcacacagctcacgctgatcggcagaccggcatcctgcaggactttgcgggtttcttccgcgatacggcgctcttctgacacactgccctgctcatcggtcagcaatggcagaaggttaaacgccagctgtttgctgaaacgaccggcttccggcgggatgccgttgaggagttttgcacactcccctgccagctcttccaccgcacttttcccgaaacgggaaacagagaacaggttggtcagattgatacgggataacccggcactctccaccagcggacggatagcggtcagtaactggctgacggtgctgtctgccagcgcaatcaggttacggttgcggtattcgctcagtgcctgcgggttcaccgacggcaccaccagcggcacatcaggctccagcgcaaacagaccgctgctgtcaatcacaatacagccgctgtctgtcgccgcttcataatacgcggcggtggcttccgcaccggccatgaaaaaggccagctgcacctgtgaccagtcaaaatcacgggcttcggtaaccagatagcttttgccgttcatgcgcaccgattctcccgcgctgcgctccccggccagtaaatataactctcccaccggaaattcacgctcttccagtaatgacaccacggcgctgccgacagcaccggtcgcacccaatacggcaatattccagccttctgacatagttatctccggaacaaagactgcaccgcgtcagcgcggtacagtcagaaaaagaatgatgaaaaaatgattttatgcgcggtattctgccgtgaaacccaggtcagccaacagcgccgcactctgtgcatcatcacaaataacagtcagtgatgaccactcgcggcgatcaggataaaacttacgcagtttatcaaactcacccgtcacaccggccaccgcacgtaatgccgcatcatcacggcggacatcataaaccagatgcattaaacgtttgagaatactttgcgttactttacctgacagtgtgatacagccgaattccggtgccggtaacaattctgacagcgcaacctgctgtggttgtccggtgaattccgcaaaggcttcaaagacctgcgtggtaccacgcaccttgccttccagggtataaccggcaatatgcggcgtaccgatatcaaccagtgaaagcagttcagttgacagatccggctccggctcccacacatccagcaccacactcagtggtttgccgccggccagtaccgataacagcgcccggttatccaccaccgcaccacggctggcgttgatcagaatgccgttgtctttcatggcactgagacgggtttcatccatcagatgcagtgtggtgtacggcccggatttattcagcggggtatggaatgtcaggatatcagcctgtgccaccagggtatcgatatcataaaatgccccggcatcaccgttatccgcacgcggcgggtcacagatgagaatattaacacccagtgcttccagacgcttcgccagacggccgccgacattcccggccccgataatcccgacggttttatctgccagctgaaaactgtcacgctccgccagcagcatcagggcagaaaagacatattccaccacagcaattgcgttacaacccggcgctgaggagaaaccaattccctgctccgccagccaggctttatccacatggtcaaaaccggcggttgcggtaccggtgaatttcaccggggtattttccagcagctgtgcattcactttcgtgacagaacgcaccatcagtgcgtcagcatcatccagcaccccgtccggtaacggacgtcccggcaccgccaccacgtccccgagacgggaaaacagggtttcggcgtaaggcatattctcatctacaacgattttcacgggcttcaccttcatactgtcggcggccggcggagacctgtcggtacggcggcacaaccggaattgaaacggatggccgctattttgccacttctgcgggataaaacctacgcccggaacaccgattgttgctaaagagagcaattaaggctgatgacggaagcgctccggcgtgacaccggccagctgagaaaacatggcaataaaggcggatgatgagctgtaacccacatccagcgcgacattctgcacactgcggccttcctgtaataacgccaccgcccgcagaaaacgcaggcgctgacgccattcactgaaggacattcccagtttctgctgacagcggcgggataatgtccgctctgaagtaaagcgccgcgccgcccactccgccagtgacgtgttatcagacggatcgttctccagcgcgctgagtaccggtgccagcagtttatcatccgtgaccggcagataggtcggctgacaacgcgacagcagcagctgatccgtcagtaccagcgccagccgtctgtccgcgtcagtttccggttcacggactttgcggccgaacaaatcctgcatcacggcactgaacaccggcgtcagctctatcacacaggccatctgcggtaactgcggtgcccactgcggcgaaatatcaataattttgaaagaggcgcaggctttgttataactggcatgttccgttcccggcgggatccagatacaaaaccccgccggcgccagatagcgctgtccctcaacggtcatttccatcacgccgctggcgacatacagcaactggccgaaggggtgatgatgaagggcaaactccgtttccgaataaaactgttcatgacggcagattaatgtcaccgggtctttcacacccagtgatgaaatatctgacttacgggccatcttgtcagatcctctctataaattggcgggatatcgttatatagaataattaagacagattacactacaccacctgcctgataatgaaaatgagtttaagaatgaaaaacctgcttttacccctcggggctgtattaatctggtctgtgaatgccgtggtgaataaactggccgccggtgccatcgcccccggcgcgatttccttttaccgctgggcactggcactcgccgtgatgacgccgttcctgattatgccggtctggcagcagcgtgcggtgatcaaacaacacgcgtggaaactgtttatcctcggttttctcggcatggggctgtatcagagcctggcgtactacgctgcttataccgtcagcgccacctttatggggattatcacctcgctgatcccgctgctgaccgtggtgttaagtatcccggtactgcggatcgcaccgaccatcggtattgtactcggcacaattctctccctgagcggcctgacctggcttatcagcaaaggacatccggcggatttactgcatcaggggctgggacagggtgaaatgctgatgtttatcgccggtctcgcttatgccttctacggcgtgctgaccaaacgctgggctatcccgctgtcgagcattcactcgctgtatatgcagattgtttttggcgtgctgctgctgatcccggtattcctcagcgccggtgatgtgacactgaaccgcgataatatcgggctggtattgtatgcggggattgcggcctctatttttgcgccgctgttgtggatcctgggcgttacccggctgggtgcaaacgccgcctctatctttatgaacctggcaccggtactgaccgccattatcgccgctgtcttcctgaaagaagagctgcacagctatcatattatcggcggtggtgtggtactgatcggggtcattatggcgcagcgtctgcgcacaccgctgacacagattatacgccgcaaaacgaaaaaaacacagccgcagcggtgtggtgcgggggaataggtaaaaacaaaatcagggtccggtattcagggataaccaacaaaaatgaaaagtattaattcattgatgaatcatataattttcttttgttgttatcccttttttactaactttatcaatgccttatttttactctgctattttttagtatctttgcaatttttcatatccgtcacaaagtgacaaaacagtatcagtattgattcttattatcatatatgactatgttaaagtcctgtcagtggcacaccaaacgacggaataccatacagtgactaaaaaatattatattcaaaatatgtgctggggctggttttatacttctattttcttttactattgctggaatgataattttaaatacagactgacctttttgctattatccatatttggatttattttttatcctgttgcaaaatggataactgaatactttttccttaaattcacgacaccacaattctggaaaagtggttttttcattgatacaccgggaagaactggtttattggccatatatggttgctctgtatttttattatcactgcctataataataatttttattattgctattcttataaaaaggctaccacagaaataggcagcctctgtttttataaattaaatcccccaaaacagattagctttttcagccagttcatcatcaatcaatactccggtgccggccattatcaaaccatagcctataaggccgacgggatttcccagcaatacactgaagatgaatgcaactacaacagtcgcagcattcccggctgcgatgacttcggttttaacaaaaaatggccgccaattatctgtttttacagatttaatcaattcaccaacccaatcaaatgcattgattgcatgactcagaacccccatacccttgctgaattttgtaaaattttttgcggtttctgctgacttgattgactctaacgccgcgacaatagccctgcgatcttcagaattcattttcttattaaagttattcctatatttttcgtaagctttcaatgcatcatcaatatcccggattttcttcccttttgcctgctctgccagagcaccagctaattgttccgccttgtctccggttcctttctgatttcttcatccaccggatgcatccagccatcatcggcatcatcccatacaggattgggggatgtgttcatatccgcaatattctgatcccagatatgagttatcctgctgctgtctgccgggatatccccggtccatccggtaacaaccatagtctcgccattatctgatgctttttgccagccctctcctttccagtgatatcccatggaggtcatcacatcacgttcaaacggtgtggtgtcttcgtatcgattcgtcataacatattccttttataaaaatgctcagtgaatacaaatcggctcccggccgtgtttttcactgtaattcaggaatatgttgtttattaaaactaaaattacgcaggtctgtatcttataaaataaggtaacaaggcgggatacaaaaaaccgccgtgtggcggttatcgtaataaaaacggaagtaagttatccggaaggttcagcgcaatccccgcgtatgggttttcgctgaccagttaaaggtttcttctccgccgccgggtttgattttatccttttttttctgtgcccggactttggcggcagcggcatccacttctttggaaatctcggtgataatctgatctttgactttattctgctccgcattggtcagcggacgccccagtttcttttgttcctgagccagccgggtgcggacacggattttctgcggctcagtcatctctgcgatagtcagctttttcattcatcacccctgtggcagtaaaaggataaacagtaccgttataccctgacagagtttgccgcaaaagaaaatgccccggtgattaaaccggggcatttatctgatcaacagggcaaaatcagttctgatatttgcgcataaccagtgtggcgttggtgccgccgaagccgaagctgttggacatcacagtcgtcagcttgcgttcggtcggttcggtgataatcgccataccttccgctttctcatcgaggttttccacgttgatgctcggcgcgataaaaccgtgctccagcatcagcaggctgtagatagcctcgtgaacacctgccgcacccagtgagtgaccggtcatggctttggtcgctgacagtgccggggtatggtcaccgaagacttcacggatagcttccaactctttggtatcaccgaccggtgtggatgtgccgtgggtgttgatgtaatcaaccggcgtatccaggccgtgcatcgccatctgcatgcagcggaccgcaccttcaccggacggggcaaccatgtccgcgccgtcagatgtcgcgccgtagccgaccacttcaccgtagatatgcgcaccgcgcgccagcgcgtgttccagctcttccaccacgaccataccgccgccgcctgcgatcacgaagccgtcacggccctgatcataagtacgggatgctttgtccggtgtttcgttgtatttggtggacagtgcgcccattgcgtcaaattcgcagctcatttcccagcacagttcttcaccgccgccggcaaacaccacatcctgtttgcccagctgaatcagttccaccgcgtggccgatacagtgtgcagaggtggagcaggcagaactgattgagtagttcacgcctttgattttaaacggtgtcgctaagtttgcggacacaccggatgccattgcacgcggcaccaggtaaggaccgacaccacgcagacctttggcacgcatgccgtcagccgcgatagcctgagtgcgcggggaaccgccgcctgaaccggcaaccacaccggtacggtagtgagatacctgctcttctgtcagaccggagtctgcaatggcctgttccatggaaagatacgcgtagacagaagcatcactcatgaaacggacagttttacgatcaataagacccgcagtgtccagtttgacgttaccccaaacctggctgcgcatgccgatctctttaaattcttctgagaatgtgatcccggaacgaccttctctcaaagaagccagtacttcctcccggttattaccgatacttgagataatccccagaccggtgattactgcacgcttcatttaatacctctgtcattttaagtagtacgggattttagcgctactttagcttacacctgtaagctgaacaagtccgatcagacgttttttcgcatctttacataccgatgttgtgctatgtcacatccggcatggcagtacagcgcaaagcagagtaaaatcagggaaaaccgaacagaatcctcaggccgtaacgtgaaaaaaaccgcaattgaaactgcacatttaacctggaatgaacagggtacacctgtttcgcaacattttgatgacgtctatttttcgaacgatgacggactggcggaaacccgctatgtgtttcttaacggaaacggttttccggacagattttcacaaatgaccactccggtctgtactgtcgcagaaaccgggtttggtaccggactgaattttctcacgttgtggcagagcttcctggcgttccggaatgccaatcctgtgcatcctctgaagcgcctgcactttatcagttttgaaaaatttccgctgaccgtggctgatttacaggccgcccaccgccactggccggagttcgcggatttctccttacagctgtgcgctcagtggccgcagccattacccggttgtcaccgtattcagttgtccggcggtgaaattaccctcgatttatggctgggagatgttaatgagctgctcccttccctcactcacgcgctggacaacaaaatcgacgcctggtttctcgacgggtttgcgccgtccaaaaacccggatatgtggcagcagtcgctgtttgatttgatgattcgtttttcaaaaccgggcggcacctttgccacctttactgccgccgggtttgtccgccggggtttacagcaggcagggtttgacgttgagcgccgcaaaggctttgcgcacaagcgggaatgcctgtccggggtgaatccccgtgacgcggcaccgtccgtgacaccctggtttgatcgccatccggctgctgcccggcagaagatagcagtcattggcggcgggatagccggagttttctctgccctcgccctgctgcgccgtggtgcggatgtgtccttatattgcgcggatgcggctctggcactcaatgcttccggcaaccgccagggtgcgctttatccgctgctgaccggacgggatgatccgcttgagcgcttttttaccgccgcatttccgtttgcccggcgtacatatgatgcactgtcagctcagggtgtgaaatacgaccatgactggtgcggcgtgatccaactgatgtatcacgaaaaaagcagtaaaaaaatcaataatatttcatctgtcccatggccggatgaaatggtgcagcgcctgtcacgggaacagctttctgagcttgccggaaccgatgtcaattttgacggcctgtactacccgcagggcggctggctctgcccgcaggaactggtacgcaataccgcagcgctggcacagaaagaagggcttcatctgcgtttaaactgtgaggtgaaagcgctgatcccggcagaacagggctggcagctccgctttgcagataacagcacagcagaggcggatgtggtggtgctggccaacggtcactgtatcacgcagttcccgcagaccgccccgctgccggtcacgccggtgcgcggccaggtcagccatgtgccatcggtaccggcgattgccgggctgaaaaaagtgctgtgttatgaaggttatctgaccccggtgaatccggctgacggtctgcactgtattggtgccagccaccagcgcaacgacttgggcacggaataccgcgaagaggaacaaactgccaacaaacagcggctgctcgcctcgctgccggatgtcagctggccggagatggtggatatcagcgccggggagtcccgtcaggggatccgctgcacattacgcgatcacctgccgctggccggaaatgttcccgattttgcggaattaacagaacgttatgcacatctggatgaacaaaaatcgtccccggaaaccgtatgcagtgttccgcatctgcctcagctgtttttgctggccgctctcggctcgcgggggttatgcaccgccccgctggcggctgaagtgctggcagcacagattttcggtgaggcccttccgctggatgatgaaacactcgctgctattcatcccgcccgtttctatgtccgtaaattgctgaaaggccgtccgctgccgaaaaaatcctgacccgcttctgaccggccaccgggctggtcttcatcacattattgatattttttccgccggttaaacgaaatttcatcagcagactttattgatcaccgccacaaacccgggtcattttgtgttcattctcacaaaaaccggctctgttcgcctgtcagcggcaatttctcttgctcaatgatcaatttacagaaaagtcagtgcgcctatacgcttcatccggaaataataaccggagaagattatgaagaataaaatagttatcgccctaaccttttcgctgttttgttttacctctgcttatgcaaagaacaataatattcccgataatactgttcgctacgatacgattgctgagcaggcgtatcagaaattcaaaagcgaaaaagccggtgatgtggcggattatattccggctctcgccaaatacagccccgataattacgccgttgtgattgccacggtggacggcaaaatctacagcgccggggataaagataagctgttcccgctggaatccctgtcaaaagtctttaccctcgcaatggtaatggatcagcagggttcagaggtggttctggagaaactgggcgccaatgccaccggattaccgtttaactcagggctggcgattgaactgcggcctgatcgcccgcagaacccgctggtcaatgccggggctatcagcgccgtcagtctgatcaaggccaaaaaccctgacgaccgctggcagcagattatggagaacatggaagcttacgctgataccaaactgacggtaaacgatgaagtgtaccgctctgaatccgaaaccaatcagcacaaccaggcactggcgcggctgatgcagtcttacggcatgttatacggcaatccggatgaggcggttgatctctatacccgtcagtgttctgtggatgcaacaacggttgatctggccaaaatgggggcggtactggctaatcacggtaagtccccgtacaacggcaaacagttactgagtgccgaaaacaccggcaaagtactggcagagatggctattgccgggttatatgacggttccggcacctggttgtatcaggtcggtattccggcgaaaagtggtgtcggcggcggtattctggccgtggttccgggtaaatatgccgtggcggtctattccccgccgctggataaagcaggcaacagtgtcagggcacaggcggctatccgctatattgctcaggaaaccggcgctgatttgtatcagtaatgtgacataaaaaaggatcatcagcatcgctgatgatccgtgatcgtctcttctttatatttgtcagtccgcgtgatgcgatcctgtttctgtcaggcgttcagggcaaccacgcttttcgcgcatttatcctctgaacggtacagcgaatctaattcccgtttggcattaaaaattattaatccggtaaataaaatcataccgatggaagggactgctctttcaatgacgctcattccgtcaagtttaaaccagaaagaaaataacagtgccagcaagaccaccgcagcaaccgctatcttcgtgtaaatagtcacagcctgttgtgctgcgtttttcggttgtaattcaaacataatcaatacctgtgttttgtggggacgaacacattttgacacaataaatgttaatagcaagttaatagtttatgctatttactcaacacatatacatagttgttgactttatcgcaacaaaagagactgtaatctcagaaataaacatcatattgcatatacggaaaatgattaaaaatcattctgttgaacagaaaaatctataatctgataacaacatccatcgctgagacataaaaaaacggcaccattttcgccgttaatgtaacaatcacaagatcttttattattatctgctcacatcttaatagtcagatgtttagttcaccataaataaaaaaggtcgcatattagtgcgaccttttctcattacttcagatattttactttttcagaaaatccggtaaatcatggaacagcgatcacagaattgcagcccgtattctgcctctttcagcataacagcctcaagtgccggtgcgcgggaaacatcgcacacctcaaaaccaagatgctcataataaggccggttccaggccacatcccggaatgtggtcagcgtaactgacgcacagccgcgtgcaatcgccacattctgtatccgctcaatcagctgacgccccagcccctgacgctgatgcgccgcagagacagaaagctcatcaatatgcagcccggtaccgaggttggataccagcacaaacccggccggctgatcctgactgtccgccgccacccacgcattgccattggcaatataattgcggaatgccgtttcggaatggccttcactgcgcgctatccattcataacccggcactgtcgcaaataacgcaccggcagaggattcaacggccggtaacaatgcggcatccgccggacgggcctggcggatacggtattgcggtttggctgtcattcctgctcctgcgcggtttgcagcagtcgtttccaggtttccagcaccagcacctgatccggtggtgtcagttccccggcactgattgcctgacggatactctcctccacccggttgtgaagcgcctcaacggagtgatcacccgactgctccagctctgccaccgcgagggtcagatgcccctgcagatagccgcccgcaaacagttcatcgtctgtggcatgttcgaccatgtcatcaatctgggcgaggatacgcgtttcataatccgcaagcatgtttgttccttaaagttcagtcaccggaatcgtttgtcaggcaaacggatcttccggccatggaaattggtccgcagtcagcggcggtgtattgtagaacgattgcagggcattaataaaccttgctgcacgcgggggtattgagttctgcgccagatactccatcacctgcccgtgaacaatacgccggaatttgacgcgatcaggctcgaaatcgccgtcaagattgtcacaactgacgttaaacggataaccggcagcctgacaaaataaccagtccagcgcctgcggttttatttccacaacctcaaattctgactgcgtttgtgcatcccggccatccgggcagtaccagtaaccaaaatccaccagctttctgcgctctttcccggcaatgcaccagtgcgatatttcatggatagcactggcataaaaaccgtgagcaaacacgatacggttataaggcgcttcatcatctgcaggcagataaatcggctcatcgtcacctttaatcaggcgggtattgaaatcagcaaaaaattcgttatcaaaaatctcaattaactgctgatattgatgtgtactcattgattatatgaaccactaatgaaaattaaaaaagctgagacagccacgtactgatagtatcgccgtgattgtcataaatcagtttgatgctcatcaggaaagagacagttaccagcatcggccggatcagtttttgtccgcggctcagcaccatacgggcaccgaggcgggcaccgataagctgtccgcccagcatggcaaagcccatcagccagataacatgaccgctgaaaataaagaatgagagtgaaccgacgttagaggcaaagttcagcactttggcgtgagcggtggctttcgccaggttaaaaccggccagggtcacatacgccagtgcataaaaagagcccgcgcccggcccgaaaacaccgtcataaaaaccaatgccgataccggcggtacagccgaaggcaaacggcatcaggcgctgtttctggtcagcagcaccaatggagggtgtcagcaggaaatagaggccgatggcaatcaccagcagcggcagcaactggcggaggaattccggattcacaaactgcaccagcccggagccgataaccgcgccaatcagcgtcatcattatcggcacccgttgccccgcaagatccaccgctttgcgccggacaaaatagaaactggcagagaaagagccgccgaccgcctgtaatttgttggtcgccagtgcctgcaccggcggtacgccgacagccagcagcgccgggattgtcagtaatccgccgcctccggcaatcgcatcaataaacccggcaatcagagcaacaaagaacagcaatatatagatttcaacaccgaactgaaaccattccattttttacctgccaataaaatcccgggcacaatacccgggacgtctgtttaaatcatgaccaggccggtaacggcggcgtgacatccgcacattgtccgcggtgacgcagaaggtgatcgagcagcacaatcgctgtcattgcttcggcaatcggcacagcacgtatcccgacacaggggtcatgacgccctttggtgatcatagccacctcttcgccctgccggttcagcgtattaccgggaacggtaatcgatgatgtcggtttcagggcaatatgcgcgatgattggctggccgctgctgatgccgccgagaatgccgcccgcgtgattgccggtaaagccggtctgataaatttcatcccggttttcgctgcctttgaggttaaccacaccgaatccgtccccgatttcgacgccttttaccgcgttgatgctcatcagcgcatgcgccagatccgcatccagacgatcaaagaccggttcacccagacccgccgggacgttttccgccactaccgtgactttcgcaccgatggaatctccctcttttttcaggccgcgcaataattcatccagcgcatccagctgacgttcatcaggacagaaaaacggattttgctctgccagtgcccagtcgcggatatcacatttgatatcccccatctgagtcagacaggcacggactgtcacaccgaatttctcatgcaggtactttttggcgatagccccggctgccacgcgcatcgccgtttcacgggctgatgaacggccgccgccgcggtagtcacgaaagccgtacttctgctcataggtgtaatccgcgtgtcccggccggaagagatctttgatggcaccgtaatcctgtgagcgctgatcggtattttcaatcagcagcccgatactggttccggtggtttttccttcaaatacccctgacagaattctgacctggtccggctcacggcgctgcgtggtatagcgggatgtgcccggacggcggcggtcaagatctgcctgcatatcggcttcagtcagcgccagtcccggcggtacgccgtcaacaatacaacccagcgccgggccgtgtgattcaccaaaggtggttacgcgaaaaagttcaccgatactgtttccggccatcgtgttttcctgtctctgattgtgtgcaagtgaatggttttaacctgtttttatgtttctattcctacaggaggaacggttatttgaaaagtttaaaagcgtcatgatgttctgctaattgatcacgagttaacataaagacaccgtcacccccgttttcaaatgacagccagataaacggcacttccgggaattcggccatcaggtgcacctgactgttaccgacctcacaaatcagcaccgcatcttctgacatataatccggcgcattggcgaggatccggcgtaccagtttcagtccgtcactgcctgcagccagcgccagctctggttctatgcggaattcatccggcaggtcactcatatcttccgcatccacatacggcggattggtgacaatcaggtcatatttcaccccgggcagatcgttgaacagatctgaacgcatcggcaccacacggtgagataagccatgattctcaatgttcatttctgtgacttccagcacatcggcagagatgtctgccgcgtccacttccgcatccgggaactcatatgcgcaggcaattgcgatacaaccgctgccggtgcagagatcgagaatcgtttccggttcagcatccagcaatcctgcaaagtgattgttaatcagctcaccaatcggtgaacgcgggatcagcacgcgctcatcgacataaaattcatggccgcagaaccaggaacggttagtcaggtacggcaccggcacgcgctcggtgatccggcgcagtacgcgctccacaatgcggtgacgctctgaagaggtcagccgggactgatacagttcggcgggtaaatccagaggcaggaacagtgtcggcagtaccagctggagggcttcatcccaggcattatctgtaccgtggccatagtaaatattggccgcattaaaacggctcattgcccagcgcagcatatcctgcagcgtgtgaagctcactgacggcttcatcaacgtaaattttatccaaagtgcctccggcggggtaaaacaaaataagatatctgatagcgtagtttgccatgaagtcgctgctaaatcagcatatcttgtgaaatgcgcggcaattttccggtggctcccgtcagcggtgaccggcagtatagcgtcaacatccgtaaaaaaatcagttacactatggaaaatactgagtgatgagatgttatgaaaaagaagacgcccctgactgatgatgacctgaacctgtttaaagaggccatcagcgggacacgtaaaatcagacaggatattgtggtgcacccgaaaccacgggcaggtgtgactaaaattgcgcctgaacggctgttgcaggatcagattgatgccagtttttatttctcagatgagtatcgcccgaatctggatatggacggtccggcgcgctatctgcgggaaaatgccagcccttatgagctgaaaaaactgcgtcgcggggattatgtgccggagctgtttttggatctgcacggactgactcagcttcaggccaaacaggaaattggtgccctgatagccgcagcccgccgtgaaaacacctattgtgtctgtattatgcacgggcacggcaagcatgtactgaaacaacagacaccgttatggctggcacaacacccggatgtgattgcctttcaccaggcccctaaggaatggggcggtaccgcagcattactgctgctgattgagattgctgaaaccgcccggcgcgagtaatcagtcaatctgtccgggaccgcggtgccagagcagtgtgccgcgtccgtcatcacccagttcaatacaggcaactgacgatgttgcaaacatcggtgccgtttcctgcggacacaatgccgctaccagataaccgaccagcggcagatgcgataccaccagcaccccattgcgcccctcttccgccagaaaacggatataatccgccacattctccgcattcccggagggcgtcagtcccggcatcacctcttcctgagcaggtaaactcagcgcatcacggatttcggtcagtgtctgctctgcccgcagatacgggctgaccagaacggtatcaatctgaacgtgctgcccggcgagccattttgccatgcagcgggaatctgttatcccttttgcggtaaggggccggactgaatcactggcggcctgcaaagcagcatcgccatgtcgcataataagaacttgcatacgtcaccgtctgaacaggacggatacggtcatgtctgaatccccgggccgtatcacatcaaagaatgatctgtttaaaattatcgttatttctgtgtccccgtcaggggaggtgaaaggcattctgcctcaaattaatcataattaaaatgattcagcacagagataaacctgaattttgttcagaacctgttcagaaaaatgaaacaaccgccccttgttctcagtgacttcactgcacttcctcagtaaaaacggcggttatccgcagcccgctgctgtaatgcctcacacggtgtgaagcgaccaccgtaacgtgccgccagtgccgtcagtttttctgtcataacgacggctgacatactatccatatagtaaaatggtccgccgaggaatggcggaaaaccaataccaaacaccgcgccggcatccccgtccgccggtgaacggataacctgttcatccagcgtccttacagcctcatttaacatcatcatcaggcagcgctctgtgatttcctgtgatgtcagacactcctgtacggtgatacccagcaacggataaatcgctttatccgctttacgcggtgccttgcggccacagcgtttccaccacggtaacggggtgtaatcataaaatccgcgtttgtttttcctgcccagccggttgtcacggaaaagcgcatccagctgcggcggcagtgcaaaccgctcaccaaatgcggcttccagcaccggcataatttttgtaccgacatcaatgcccacttcgtccagcagtgctaccggcccgatcggaaaaccgaaatcagtcagcgctttatcaattttttccggcggttcaccttccgtcagacaacgtaacgcttctgtaatataaggtgccagaatccggttaacataaaacccggctttatcaccaaccacaatcgctgtttttccctgtctgcgcgccagttgcagcgtggttgccagtgtcaccgcatcagtgccttcatgggggataatctccgccagcggcattttttcggccgggctgaaataatgtaaaccaatcaccttttcaggccgtgatgccctggcggcaatatcacggataggcagtgacgaggtgttcgaggcaaaaatagtatccggtgatgtcactgcctcgatctcagcaatcatctgttgtttcagtgccagcgattcgaaaaccgcttccgccacaaaatcaatgcggtgaaatccccggtaatccgtagtgccggtcatgccgctcatcagttgtgtccgctcacgcggggagagccgtctgcgtttaacctgtttgctcagatgctgccagaaaaaagccagtgctttatttgccccttcctgcgaaacatctttgattctgaccggaagccctgcgcgctgacgggtaatcgcggcaattcccgcccccatcagcccgccgcccagcaccgccacatgatgcagttctgcgggttttaccccatcggcagactcttttttcagtgcggttgaggcaaaaaagagatgacggagtgcaccggataccggggtaaccgccagtttaccgaatgccgcggcttcggctttaaacccggcctcccggcctttttcaaggccgcactgcaccacgtcaataatctgttcagccgccggatagtgtccgccactgcggcggtgaacctgactgcgggttatacgaaagatgatatcccgcagtcccttcattttttccagtctctgccggaaaggtaccggatcccgctgtgccggatttgccgacaaagcacgagccaccgctgtttccagtaaaatgtccggcggaacaatatcatcggccagccgcattttgactgcctgctttgcccgtaactgccgccctgtcagcatcatatccagggcggccaccagcccgatcagggcaggaagacgttgtgtaccgccggagccgggtaacagacccaactgaacttccggcagccccagccgggttttatcactgtctgtgacaacacggctgtgacaggccatggccagctcaagtccgccgccgagacagctgccgtgaatcgctgccacaaccggcagaggataattctcaatcagattaaataaccgctgaccggattcagacagtgcctgcgcctgtgcggcctctgtacatccggctatcatatgaatgtccgcaccggcgataaacgtatccggtttaccggagataatcaccattgcccgtaatcccgggatttgccgggcatcacgcagtactgcctcaaactgtgcggcaaactccgccttcagggtattcactttttcacccgggacatcaatcgtgatgaccccggtgtgatccggacgcacagtcaggcggaaggcagaaggtgtttcatcatgttgtgtcatcatcagtctcccgtcttattccgtttcccagatcatcgccacgccgagaccgcccgccgcacaggccgtggtcattgcaaaaccgccgccccgccgccgcagctcccgcagtgtttgtgtcaccatccgggcaccggttgcagcaaaaggatgtccgtaggcaattgacccgccgagcacattaaaccgcgccggatccacttctcccaacgccgctgtccggttgagtttttcacgggcaaagtcctcactggcaaaacagtgcaggttagtcagaacctgggctgcaaaagcttcatgcatatcaatcagtgtcaggtcagataatgtcagaccggcgcgatcgagagccagcggtgcggcatacgacggccccagcagcatatcttcctgcactgcgttacccgtaaatgcataactgcgcagaaagcccagcggcgtcagcccgagttcacgggcgcgggcttcggtcatcatcaatacggctgccgcgccatctgtcagtggtgtgctgtttgccgctgtcactgtaccgtgacgtttatcaaatgccggtttcagttgtgcatagctgccgggcagagagtttttccgcagcgtattatcttcttcacatacctgactgaacggcgggaaacgggcggtcatcacctcatcgcgcaggacaccggatgtccacgcctgagtggcggcctgatgtgactgatgggcgaacgcatcctgtgcctgacggctgatatggtaacgttttgccatctgttcggcggtatcgcccatgcgcagaccagtggaatattccgccaccgcaggggcaacaggcaggaggtcgcgcggccgcaatgcggccagcaaccggagtttctgcgataatttccgggctttactgagatccagtaatactccggccagtttgcgtgatacaccaatcgggagcacagaggcggaatctgccccgcctgcgacggctatctgattttgtccgcactgtatcgcctgtgccgcattggcgatggcctgaaaactggtggcacaggcacgggttactgaatacgcatctgtggttaccggcaacccggtactgagcacaatttcacgggcaatattgggcgcggcaggcatttggatcacctggccgaaaacgacaaggtcaaccagttctgccggaaatgactggcgaaaaaggagttcctgcaccaccgcccggccaagttcaaccgccgggatatcacggtataccgtggactgccgggcaaacggtgttcgtaatccgtcaacaactgcaatgcgttctgcctgtgcctgcttcattcgttcatccttacatgatgagaggttatcacgaactgccggtggtctgacctgctgatattgttaacatcgtgttgcattcacgcaatgtgaataactgaaaactgcgaggtggctcaggaaataaactttttataacaaaaaaaacgataaaaaaggcccccgcattcaccggaggcctgaatttagtttgcgtattattctgatgaattaacgcagacccagttcaaagatcagtgtttcagcctggcagctgaaagtgaaatccgctttcagcagaacgccgtcagccgtttctttatattcgctgtggattttgcatggttcagatgctgctgcatttgctttggcagtcagtgctgccatcatctgctcagcgtctgctttagatgcaaatacgcgctcgaaagaagaggtgcagctttcgttatcaataatagtgcctacatccacacagcagcatgctgcggtttcttctgcgctgcacagttttttttcatcagccatttcagtctcccgttagttaaaaatagcctgcagtcttagtactgaatcataccatttatcaaagtaaaccataaaaattcaatctattgtttgatctactcgggctaaagccactttttgctctcaaaaatcacgttattgttaaatttttgtaatccaaatcgcatttttgcatctcaatccgcttattttcgtacaaaaaaataacatttcagtgtgctgattctatactctgtcaactggtctgatttgtcatatcaacaagcaaacatacaatccagcgctacttctaactaccaaagtagtacataaacaaaataaacaagagggttttggtcatgaaccagaaaaacctgttcactcgttcagcactggcagtggcagtttcattaacagcaactcaggcttttgcggcgggttttcaattaaatgagtattccacgtctgcactcggacgtgcgttttcaggggaaggtgccgtggcagatgatgccagcgtcggcagccgcaacccggcagcaatgacattatttgatcgcccgtccatgtccgccggtgcgatcctgatcaacccgtcagtggatatcagcggtaaatccccgctgaccggtaacagcactgatgccaaagatatcgcgccaagcgcggttgtcccgaatctgcattttattatgccgattaatgaaaaatggtcagtcggtgcatcaaccaccacaaactttggtctggcaacagaatttaaagataattactctgccggtgctatcggcggcaaaaccgatctcgtgacggccaactttaacgtggccggtgcttatcgtctgaatgataacttcagctttggtctgggactgaatgccgtttatgctgatgcggaaatttcgcgtcataccggtgagctgggccaggttgcagccgggctgaccaaaaatcctgcattagcaaaaattcctgcaaactctaacctcgccaaactgaaaggagacggctggggttacggctggaatgcggggatgttatatgagctggataaagataaccgtttcagtctgacatatcgctctaaagtcactgtgaaatttaaagacggtgatttcacccaaaacattccgggtcttcttgaccgctccaccaaaggtaaactggatctgaatttaccggatatctgggaattctccgcttatcaccgcgttgcaccaaaatgggcggttcattatacctttgcttacaccggctgggattcattccaggagctgaaagcgacagataaaggtaacggcggcgttctgtttgaaaagcatgaaggtttcaaaaatgcataccgcgtagcattaggtaccacttattatcatgatgataactggaccttccgtggtggtattgcctttgatgacagcccggtcccagcaaacaaccgctctatctctattccggaccaggatcgtatctggttcagcctgggctcaacctacgccttcaacaaagatgcgtctgttgatgttggtgtcgcctatatgcacgggcgtaaagttaatatctctgagccgctgatgagtaaagatcagcttgcagctatcggtggcaaattgggtaacccgaacctgcaaatgccaaactacgaattcagctcctccggtaaagcctggttatacggtgttaactttaactacagcttctgattttccggtctgaatgcataaaaaaagttctggtcactgaccagaacttttttatttgtctgccaccagcacattattcgctgtcgatagaatccagctcatcggcaatcgctgccgcattcgggttttcctgcactttcagtgccccgccggaagcaaggaaatcattacgctggaagtaagcctcacgcatcatcagatacgggtcgctggagttatgcagcaccccttccgcatccagtgcctgagcacggttatcaatcccttcaatagcccacttgccgacacccatccagatagtcagataactcagcatcggatatgtggtatcgagccagtcgccgccatccacacgcggtgttgcgccgccataacccggaataaccacatacggaccataacccataccataataacccagggtattaccaaaccgggccggttccgttttcgccagttcagggttcgccatagacgcgacatcaatcaggccgcccaggccaaagactgtgttaaggaagaagcggttaaagtgcttaaatccctggtaaaaatccccgcgcagaaagttgttgaccatactggccggttcttcgaggttaccgaggaagttgatggtgccgtttcgtgccggtgtcggcacataatcgcgccaggcaaccgccaccggtctgagcacataaggatccagcacgttatagttaaaattgaacattgagcggttaaatccttcaagcggatcactgcgcgttcccggtgtctgatccgaacttgcgcacccgccaatcagcagcaccgcagcaagtgtcaggccacttacctgatacttcatatgtttctccatgccaaaacgtgagcaaaatttacagtttcacgtatctataataggtcaatattacccggattttgtatatttgtgtatgtaaatcatgccgaaattaccgggttaccccggcagcacagagtggtatcctgctcttcaggtcagtctttgtcagcaatacaggagccatcatgaataaaaaagtcggatttattggttgcggaaatatgggaaaagccatccttaacggcctgatttcaggaaaaattatttcccctgatactgtttttgtacataaccacagcccggccagtaccgaccgcgtggcgcaggaattcggtgttcacggtgagacacaggctcagcgggtggcggaacaatccgatattatttttataggtgtaaagccttacgccattcccggtgtattacgtgatatttccccttgccttaaagcggataccctgattgtttcgatggccgccggtgtgactctggaagctctggaagccgccctgccgtcatccgccaaagtgatccgtctgatgccgaacacccccgcgctggtcaatgccgcgatgacatccgttaccgttaatgcttatctgacggatgaagaaactgagctggtgatgtcactgtgccgcagtttcggccgcgctgagttagtccctgaatcactgattgatgccgtgatcggcgtcagcgggtctgctcctgcgtatgtttttatgtttattgaagcaatggcagatgcggctgtggctggcggtatgccgcgtaaacaagcctatgagtttgcagcacaaaccgtaatgggggcggcaaaaatggttctcgaaaccggcaaacatccgggcgaactgaaagatatggtctgctcgccgggcggcaccacgattgaagcagtcatcaaactggaagaaatgggtttacgtcaggcggtgatagccggtgtccgcagtgcgacagaaaaatcacaggaaatgagccgtaaataatcacctgataccggaaccggcaacaatcgcgccggtcccggtctgttcagttgctcaccgccctgtcagttacctttggcctgtgataaatatttctgcatctcatcttccggaaccatgccgccgccggttgcccagaccagatgtgtggcattcgccatccgttccggtgccagcgattcagcctgtaaatacgcctgattccgggtcacatgcacacaaccgggcatgcccgctaaagcggaaggttccagccggatagcttccgtctgattaagcaatcctaacaggttatacatttccgcatcgtcaatggtgtaataaccgtcgatcagccgctccatggcccggccgacaaatccggatgcccggccgaccgcaagcccatcggccgcagtaatattatcaataccgatttcctgaacagagatggcatcatgaagaccggtatgcaccccgagcagcatacagggtgaatgtgtcggttccgcaaagaaacaatgcaccgcatcaccaaatgccagttttaatccgaatgcaacaccgccggggcccccgccgacaccgcacggtaaatacacaaacagcggatgctgctcatcaacggtaattcccttttctgcaaattgcgttttcagccgcagacccgccaccgcatagcctaaaaagagtgtggaggagttctcatcatcaataaagaagcaggacggatctttttcggcttccttacgcccctgctccaccgcgatactgtaatcctgttcatactcaacaacattgacaccatgagaacgtaatttgtcttttttccattgtctggcatccgcagacatgtgcacactgacactgaaacccagcttcgcgctcataatgccgatggacatccctaagttaccggttgatccgacagcaatacgatactgactgaaaaactgcctgaatttatccgagaataacaccgcataatcatcaccggttgacagcaatcctgcctccagcgctaatttttccgcatgggtcagcacttcatagatcccgccacgcgcttttatcgaaccggagatcggcagatgactgtcttttttgagatacattttccctgtcagcggcgtctgatagcgtgccgcaagagctgcctgcatctccggaatcgctaccgcttcagattcaatgatcccctgcatgacctgtgtttcaggaaaggcttccatcagatacggggcaaagcggcttaagcgtgcttgtgcatccttcacatcctcaagcgttagtcccacatacggcaaacccgcttccgtggtggttacgctggggttaaaccatgccacctgttttaaatcaatcagtttctgaaccaatggatagtcagcaattaacttttcaatattaatctgagtcatcattactctcttttaaatcacataggaaagtgcaaaggtgccggccagcgcgacaacggatgcaatcagcgtggcgacactgtaataacggaatgtttccgccagcgtggcattacaatattgtttcaccagccagaataaggaatcagtcacaatggtgcagccgattgccccggagccgatagccagcgtcataatttcagggctgatgtgcgggtacagcggcatcagcggagccacgattgcagtcgcgcccatcatggcgaccgttgctgatccgactgcggcatgaagaatgatagccaccagccaggcaagtaaaatcgggtgtatatcgataccggacagcaccagtgccagagaatcactcagcccgctgcctttcaggatgccgttaaatgcacctcccgccccgataatcaacaagatattcgcaatcgaactaaaactttcttctgttttgctgagcaggacgctcattcccatattccggcggatacccaatacgtaataagcggcaaaagcggcgataaacatcgcagttatcggattaccgataaacaataaaaagatgaataacgggctatctttgctcatgtttaaatcagcggttgttttgatcagcatgagcacaatcggcagcagaaccgtaaataacgccgcgcctaatgagggtaaatctttttcttcacggactttcaggtcagcaaacgcggccggtacaactttgaacggtaaacgatcccccaaaaatttcaggaacagcggcccgccaatcagcgatgcaaccagccccaccactaacccggccactatcaccgttccgatatccgcgccgagttcattggtgacaaataacgcagcaggatgcggcggaataatgcagtgtacggccatcagcgccgtacataacggaatcgccagttttaataatgaggtatttgtttttttggcaatcgaaaatgccagcgggatcagtaatacaaccccgacttcgacaaacagtgtgataccacaaataaggccgatcaatatcatggtgacatcgggacttaaccagcggcatttttccagcgtgatcccgattcgctcagcagcgccggatatttccatcatcttcccgagtatggttcccagtccgataatggccgccaaaaatccgagtgtcccgccaatcccgttttcgatggcgctgaccatatcctgcggttccatattcatggcgataccgacaaaaaagctggtgagcagcagtgctaaaaacgggtgaaacttaaatttaataattgaaataataatcagcaagatactgaaaaccagcgtgccgatcatccacattacagagtccatatcctacccctggttatattgttgttgtgcattcattggataataaatattcaggggtgacaaacgatgaaaccggagccttgggttagctgggttaactcaaatgcgtgacattcatcaaaatcagcactttttccgtgaattgcatcatataaattcaccttaaacgcggtattctttatgtaaaatcatcctgcataataaaaagggagcggctatgtcatcggatataaaccggtatgaaccatcgggatccctgcggcgaaacaaacgggtatcaggtcatcagctgtcacgtctgcatactttcgaagcggcggcacggcacagttcatttgctctggcagcccaggaactggctctgacgcccggcgcggtaagccaccgtatcaataccctcgaaagtgaactgggtttccggttatttgagcgttttcaccggcgggttgaactcacatcagacggtgaacgcatctactgggcattacggaaaaacctggatgacattaaccaggaaatcattgatatcaaaaatcaggaaatttccggcgagttaacggtttattcccgcccgtcactggcgcaatgctggctgattccggggatcgcggattttacggatcaatacccggctattcagctgaatctgttaaccggtaatgatgatgtcaatttccgcggctatggtattgatatcgcaatttattacgatgatatatcaagacctaatctctattgcgaagatttgatgtcagaatcaatcgtgccggtttgcagcccggaatatgcgaaacgttatgagctgcataacaatattcatcagctcaggaactgcatgttattacatgaccgccaggcatggagcagtaactcggattacgacgaatggaaagcctggagtgaacactatcagcctgatttattccctcaccggcgcaatttgtgttttgatcgttcagatttggcgattgtggccgcgatgaatcatgccggtgtcgcgatgggacgtaaacaactggtggaaaaacgtattcagagccggatgctggtgatgcccttcggcgatatttcactgacatgcagtcagcgatattactttgctatgcttggagacaggcgtaatccgaaagcagatatctttatttcgtggctgaaacaaaaggttacgaagacattgccataaatacagccggacacccgggatcccgcaggtaatgcgttcaatctgcacatccgggaccggcgcaccacataaaaaacgcaccggtaaccggaaacgaagaaaaaacaaagcggaaataaagacttgatagaatgcggggttgagcgttaacatatgacccgccgcaaaaccggccataccatcagacatcatgtcctcttagttaaatggatataacaagcccctcctaagggctaattgcaggttcgattcctgcaggggacaccaaaataccgctcgtctgtccgtatccacaatatgaacaccagacttaccggattcggaaaaaatgtccgtgatcccggcagttataatctatcctccggataaaaaagccccgcaatttagcggggcattgctgatttaatgtttgaaattatagctgcatcaaaaatcgagcgtaaacccaccagtaaatgttggtgttgtcggtgtatccggcggtgtacatgtctgagtgaccggcggacacgtaggtttcggcgttacaggcggacacgtaggtttcggcgttacaggcggacacgtcagttccggtttttccggctctttacattcacacccgcatttacagcagttgttaacaacaatgctgataaccgtctgcccaccctcacagcacatttcctttgttactttccgctccggaagcccgcatctgctcaaactcccgtattgcccgtttatcgtgattacagtccgcgattgttttcatcgcatccgtcagcagcaggatcgcgccgccgtaagtcagttcatccgggataaccggcagcgggcagtcagcgagaagatgagccggaaccggcaccaccggcgcgggcacgaatgtctctctcgtattgctgcaacccgccggtaacacggccaggcacagaagcggcagcacattcatcctctttaagtacggttttaataattgtcttaacattgatatgctccgcctcctccgtctgctttgcccggatattgctgagcgcaatatgatgtccggccataaacgccacccgggtcagattattaacagccagctgctggtcatacttatctttcagtatcagataattaccttttacaccgctgtacagatgcagtgtcagcaacagacaagtcagtattacaatgcagagaccggccagtatttttgtcagtatattcatggattttcacactgatagtggataacggccgcccgcggatgtcccggcagcggctgacagtaatccgggagtgaatacaggtaacagcctgccagcaggcaggctgtcagtatgagaatcgcggcaatgatcagcactacagggttgcacgacatacctcactctccgcttcacgccggttaatcagcccctgccactgccggccgccggcaaatgtccagcgtttcatttcctcacaggcaccggcaatatcaccgctgttcagttttcgcagcatcgaagagcgggaaaacgcccccgggccgacgttgtaaacaaaggaatagatggcagcccgggtggtgtcatccacaggaaccgtaatcatcggatcaaccgcgcggcggattttatccagatcacggtgcagcagcgccccgcattcatccgccgtataaatctttccggcctgaatatcactaccggtatgcccgtaacagacagtcagcaccccggccacatcgcggtagggccggtattccacgccttcataggccggaatcagcaccagagcggtagaaattgcgccgccagctgctgcagcaatgacttttttgctcagattatccttcatgatgatctccggcttttatctgaaactctttccgtcggtaataccaattgataaaaaatgtaccgatggtgcagacaatcccgataaggactgcccactgatccagcgataacacacccaaaacggaagtgataagcccccaggtatatgctgcgggcccggaatatttatctgacatgctcatatacactcccttgcagagtgttccgtaaatattattgaaaggtaaactcagataatgtctgaaatataaaaattaatgtaaggtcgttttcggttctttattccttactgcctttaatcgtgaatcaatatcggtaattgcagaacatccgaaccccggagaaataaaggctttattgaccacacgcccgcagaatttaatccgtttcattccctttgacggacatttcattacaggattaggttcaggttctcccctgatttcacggacatagcggtacagacgcgtgacagcatccggtgccaccgcatattgcggaatataatgccgtccctgcttaaccatccctgtttttatcagactgccgattttatgcaggatagtggtatatgtgcggataaatatttcagatgtctctgtatatcgcgcagcatcactgttggtaaagcaatcataatcccggcaggcccggataatattgacgtatattttaaatttttcctcagtcataatatatcctctgaagtatcatcctgtaaattaccggctgcgctgcgtattaaacgaagcagagccggatgtcattaaataaaaataatgtgcagggcaaatttaaataaagttactgaatataaatagtgccgggaaataccggcgaccatcccgcttacgggatgcttttttgatggcaatgcattcagcatgccggagcctgttcacacacggagtggttcaggctgttggtgcgcatttttcagcgcagtctgttaaagagcgggcaacagtatctgttgatagacaaataatatcataactattaaatatgtcaatatctttagtattgacaaaaattctgattttggtattaatattgtatgaatgaaaaacgacaactgacgacagaacagctggcagactgccgaagactgaaagctttgtatgagtcaaagaaaaaagagctgggtatcacccaacagagcattgctgacatactgaatatcagccagggcgccgtcggtcactatcttaacggccgtaatgcattgaatttacagacagcaagtgtgttcgccacgcaactcaatgtccctatttctgatttcagtccgtctcttgccgcagaggcgcaggcactgagtgccgctattgacagcaatatttccggccttcgcccttacaaaccctccccgagatacccgttaatcagctgggtacaggcgggtgcctggaatgaggcgaatgaagcttacgggctggatcaaatcgacgaatggtatgaatcagaaacccatgttcagggggccgcattctggctgagagtcgaaggcgaatccatgaccgcaccaaccggcaagagtgtgcctgacggctctttgatcctgatcgacaccggcaaagattccgaaaatggcagcctggtcgtcgcaaagctgacggattctaacgaagcaacgttcaaaaaactggtgatcgatggcggcaactggtatctgaaaggactcaacccgacgtggccggccatgaaagttaacggtgactgtaaaattatcggtgttgccgttcagatgatgatgaaactgtaatcatctcctgccgccctcctgccggagggcattttactattcacagataatactcttagtatttatttttcggaaaaaataataccttataataataccattagtatttttatgctgatggttcagaaataaagggaggtaaaaatgagttgccgcggatatcagtgcgccagagcccgccgggctgcacgcagacaacaactacaagcggaataccggctcaatgcagcgctgaaagccgccatcaacggagaatgcaatgaaaaaccgccggttttatctctgaacagacgtccgatggacagagtcacaaaagcactctctgtccgtcgcacttatgctgtaattcacccggtattgacaacattatccgaccgaatgcagtttgacgtgtgatccgagatattcccgcttacgctggttatcagccgctttgtagcattcaggatacagtgccgcgatctcggccattaattgtgctggtgtgttaactgattcaatttttgatgcaagagccagtgccatatcaaaagcgacccgctctaccggattatattttggtgaaaagattttatttggcatattgttgctccgtttatcattgataaataacaacatgcattacttatcattatgcaggcttccggaatgagtatatcgcctgaacaggtcagtaactgcgtatttgttcaatacaacggctgttttccggtttgctatattctttttttcttatcatgataactttcggatattaatgtgctatctgtcacactttgtcatggtttgctgacaaatcccgataatacattaatcaagctttaaaaagccggacactactacacatccgctccggtatagtaagttcatccaagtagagagtaccctgaagaaatgttgtgattatgcccgcggattgcgggcttttttttatttctgtcaagatgaaatttttgcatcacccttcccgttgacctttctttcattttaccgctatttactgatacatactttcagtaaacaaaatggtgaacataatgaaaaagcaattttctctgtttttttccggtgctgttttagcactgggatttttactgtcaggctgtgataagggcacaactgacatgacaaaaattaaagtcggtgtgattaatggcgccgagcaggatgtggctgaggttgccaaaaaagtggccaaagaaaaatacggactggatgtcgaactggtcggtttcagcggttcattgttaccgaatgatccgacggccaatggggatcttgatgccaacgtcttccagcatcgcccgttcctggcccaggataataacgccagaggttataacctggtcgctgtggcaaatacctttgtatttccgatggcaggttattccgataaaattaaaaatatcagtgaattaaaaaccggtgataccattgccatgccgaatgacccgacaaacctcggccgtgcattattattaatggaaaaagagaaactgattaaattaaaatccggcaccggtttattaccgactgcgctggatattactgaaaatccgctgaaactgaatatcatggagctggaaggcgctcagttaccccgggtgattaaagatccgaaagtcacagtagccattatcagtaccacctatattcagcaaaccggcttatcaccggtaaaagacagtgtgtttatcgaagataaagaatcaccgtacgtcaatattattgtgacccgtgaagataataaagacgcggagaatgtacaaaaatttattaaagcttatcagtcaccggaagttgccaaagccgcagaaacgctgtttaacggcggcgccattcccggctggtaatcacgacaatacagtgccggatactctccggcactgtcattcacgcctcatccagtcccagagcccggcaggaaagcagtacaatctgcccggtgatttccgccagttcatcctcactgacagatttcgcttcactgcggcacagatacgccttttgtgccaccacaaaccccagaatctgccctatcagggcatgcgccctgataatggttgtttttgtatccgcctgcgggtctgcaagctgtgccagcagagagagccgcttatgaaagggttcaataaatgactgataaatcacatcataattttcagtctgctccagctgttcccgcaggatcagcgtgccgtacagagcgcgttccggcgataacaatgccttgcacagcccggagaccatactgaccagtactgttttcagtgccgttttgcccggctgctcctgtgccgtcagtgcctctgtggcagcatcgatcctgctgacatccgtcacagcggccagatcatcagtaattttccggatcactgcggcatacacccccgacttaccgcccagatgatacggaatagctgactgattcacacccgcctcctccgccagctgccgggtccggacaccgctgacaccgctgagggcaaacaggcggatccccgcctgtatcagtttctctctggtctgctctgaggagagcgtatgtttattcatcttttccgtcatctgcagattcaccggtataatcagagatcagcacgcatcagccgggtggaattatcattcagctcaattccgccgtttttcccgacaatgaccgtaccaccaaggttacacagatgataaccaaaggcacaattcggttcaaatgcaaagctcatccctgccttcagcaccagttcccggccgggattcggcagacgctccactttgcggtaacgggataccagcggcagagattcaattcccggcgcagtaccgaacccgatcggaccatacggattgatactgtggatcagcggatgcacatgccagccgccggaagccagcagcggtttttccatctcatccaccacttccccgaatgtcacgccctctttcagatatgacaccccgatgtcataacattcccgtgcgacctgtgccgctttctccagctgcgggtgaatattaccgaccgcaaccgctgcctgatgctgggtttcatacattccgtacagcgcgaaaatttctgacaacacaatatcaccgcgctcaatctcccggggtttctgtgagcggtactgccaggcaggctgaccccagccgatatattccgggccggaccccatcaggatctccgccgtaaatccccccgcagataaacaggtggcggtgactgccgccgcaatatccgcctcactgtttcccggtaccgctgtcacgcgcatggcttcactcattgcttcaccgatggcggcagcgtggcggatatgtgccagctcttcctcactttttacggaagcgcggacaaaaaagtcacggtaaaccggcagaatcgccgcctgcggatacgcctctttaatcccggtcagtgtattgaacggcatagcaccatcaaaatagaacggcggatacggctccagcccgatcaccccgatttgtgccgccgccggtacattcatctcccggagcagtgccccgatattacgtccggttttaccgaccataatctgcgacggcgacaaccactgattgtccccgcgtaatgcggcctgcatatggtcggcaatcatcatcggcgcaaatgtcaccacaaccgggtcattgtcctgataaaagatcaccacagacccgaggcggtcattggtaaaatagtgatccacgcagaacggtgccggggcagcagattcccggtcaccataaacaatcagaacatccagattacgctggcgcatgatgtcgcgcgccagatctcagcggcgatcccgctcctgtaaagagaagcctgccggtattgctgtgtttactgttttcataagccacccattattaattcatttgaacgaattaatatcgtagtgaatgatccgaaatccgtcaatgacaagatccggatcaacacctggcttccccgctacgcggtgctcgttcacccgatggaaatgcgcgaaggcggattatacaatgtggaaaaacggattttcttatttaactttccacaataatcctctccggaaaaaagaaaatgaagactctcttaattctttatgatgaaccggattaattcaatttaagctattaatcactattttttatgataatagtaataacaccggcactgtaaaggaaaaaacaatgaatacaaatcagagtgatatcgataaggcagcagcaaaaataatcaaaggaatggagcgtattaaccgctttgcggataattacactgcatatctttcagaaaaagacaagatgcaactggtccggctgacagaagaattacaaaaaaaacttaatccgggaaaataataaatttatttcctgttgatgaaccgtttaaacttcaaaaaataccgacataacaaaatgattttaaacaataaattcaatattgttaactatagcggaatatcaggatttgtcagttttctggagatttgaaaatattgccactgtttatgtatatcccgttgtgcggcgaaaaaaacaggaatatgtttcatccatacccgctgagcaggtataaatactcccgtaatcctgaggatatcataatgaaacattcagcccttattgttgcaactctggccggtttattctctttcggtgcaatggcatcgactccggcaccggcagtttccgctgcgcattccggtattaccgccactaaagcggacagccatgcgaaagccgtaaaacatgaagcaaaagtaaaaagtgaaaaagggaaaaaagcgaaaaaagttaaagaggaaaaacagggcgcaatctgatcattataacggtgttatccgcggattaaaccggcgccataccggggccgtaaaaaaacctcccgttcacgcgggaggttttcctttcttcttcattacccgttatcaaatcactaacgcaacaataaagataatgagtgccatgcaggtgaagaaaccaatagggtataccatcgtacttttcgtcattggtgacatgatcgaatctcctgtaaaccttacttagtatctgacaaacaaagaacccgcagatatttaaggacatccggagatataagtaaagctgatagatcacaaaatcaaccggcaacctgcactctgttaattcgctgcagattattacttttcggcggagatatcctgcttactgcacaatcaccatcaccagcagaacaaatatcagcagcgccagataagatttagcatagagtttatccgggatccggccaatcagcggcgcgctgagtttttgccccagccaggatccggcaatcagtaacataaaagcctgaatatccacataaccggcaaaaccgctgccgaattctgccgtttcatggcgggccagcaaaatataagtcagcgtaccggccagtgccatcggcaaagacagcggattggccatcgccgtcgcctgtgccatttccgcaccacgacggcgcatcaacggaacggtcatcacactgccgcccacccccagaaacgctgccaccacaccaatcacagtaccggccaccgcaacagcacccgctggcattgtccgcagatgagacgctgactgtgtcataaacccggggcggaaaatactgtccagaatagtgatggcaaggtaagcaataaacatccacttaacccatatcccctgaactgcaatcgccagcaatgcacctgccaccgcaccggcggcaatatatcccgccagcgggcgtacctgcggccagttaatcattccggcacgatgctggcgaagggttgccaatgatgcgctgaatatcatcaccccggtggatgtcgccactgcaatatgcatggccgccgccgcggtatggctgtctgccgtggctgttaacaatgcataaagcagcggaacaataaaaaatccgccgccaaaaccaaacaataccgttgtcgacccgacaatacagccacacgcaaataagagtaaaaacacaggaaccgccccgctgaacataattgttacccatactataaacagcagacaggcaatctgcttttgcatgcaggacaaccggtattgtatttcagccaggatgaattcagcggcacaggaaaaagaaaaggcccgctgatgtgctcaggggccttaataaatctgctgcttattgatcaggtcaaatctttaatcacttcagaagggccatttttctgtacagacgcgataccattcattgccccctgctttgaggcatacatttcgctggtggcaataatttcatggtttccggctttcagaacaaaatagtacggctgcggtgtatctttggttgatttttttaactcgtaataccccataacaagctcctcggttgaaaatcatgttaatacggcaaatcataatgacgatttcagtatagtcactaatacgtaaaaacaggaaataaaaaccggaaaagataaaattcactgatattcagcggccaatcatcagtaagtaaggggtattatcacagataaaatgaccggcttctttcataccggatttcagatgtgcacgaaccgaacgttcattatcctggttaataaaggcaaccggttttccgctgttttccgcacatagccgctgatacagcgccggtaagattccctgcccgcgataatctgccccaatacagaccgggccgtaaaaccagttattttccagtaactcaccgaattgctgtgaaatcaccgcggtcaccggcgatatttgtgcggactgcaccggaaaactgaacaccaccccggcaatcacgtcaccatcctgcgcaataatcaccgtcagtgcatgcgcaaacatattttcaactttcttcaggggatattcccccagcaatccgccctgccgtgactgagcattctcctgtaataatgccgccacctgcccgcaatctgtattaaccatctgccggtaacaaatcatgtttcctcctcttttttgtccctgtaaacaaaaagccaccggattaaccgatggcatattaaggaaattcagtcatcttccggcggatctttaagaagctggtggatttcttctttcaggcgtaatttctgttttttcagctccaccacttcctcactgtagccgcttctgtccgatttttccagacgggcaatttcatgatcgagttggttgtgtttatcaaacagcgtgcgaaactgatgactattctggcgaagatgggagatcaaatcacggtattccggaaacataacaacttacctcctgtcagtgactatagtgccatcatctgcgatttcagttcgcaaatcaaaggccggatttaaaaaatttgacataggtttgcggtttaataccgtatccgttttgcatgaagattatgcagcgaccgaccggacaacaaatcaaggggttattgttaaggtcatactggctgatggttttacttcatagagctgtttttcactattccagacaaattccggcgatgcatactggccatatgcataagaaggaaatttcgcaggcttataagaaaaatcactatcgataccggtatttctgctctcctttaatccggctttaaaaagttcattctgtttatttcggcttttctctgcatcctgttcaaatttcgaatgaccggcaagcatataggtcggcttattcataagattttcaggtgtttttttggtggcgacggttaattcggcgttagttttattgcctgcttcagcacatccgacaagaagacataatgacaaatgagatataactacataatgcataaggttaattcctgataatttaacccacgcattattacataagattattttatatgtaaacacaatgaaaaataacgatatgttaccaactgataataccgcctgagactaagtaaaatataaaatgaatttcaccactattacttttatttgtaaaataaataacctatatttatccatttaatagatgatttattcgctgaaataaatcttttaatattttaatcagttataaggatttcctgttcccgcctgtgagattattgcggtgcttattggtgcgtttactgttatcttcggaacaatgatttttatcggattatggtgctacagtaaattccgtcctttaaaaataaccgttattgactgatgtaaaaccggataagacacagaaaaagcctcaccagaagtgaggctgatttctggtgtatcgatgacgcttaaggatgttttgcaggacatccgtttgtcatggcgaattcggccagaataccatcaacgtcattaataaagttttgtccgtccgcgaaaactaatacaggcaatgactggttttcttccccgataagatccaccagcagttttcttggtttatcaaaatcaacataaacaacatctgttgattcacgcaattcaggattcgtggcaagaacgccttctaacagcgtgcagtcagggcaaagaaagagactaccgggataatttaagtcagaaaatcccatttttaaaagatacagtgtatttttcatgtgttcctccgttttgttataaaaataatctaccattcatccggtggaaataatttccataactcactcagatccaatgaaaaaaaggataaatattctctttccgcaaaacaggttcagtagcgttcaaatacctcataatcagggcgctcccctctcataacagcccgctgctgttcatgcaccggtgccctgtcagcccttttctgctccgctgtacgtgaatttttatggggttgcggccaatccgttttgttgtgcccgacctccggccaggttgaacatcctgtcagcacgacatgaataataaggaataatataaattgcatttcaggaaacagaaaagacagttctgaatatattaagcagcgccgaaaactcagtatatccttccctgtccaaaaaatgtccggcgttattttcaataataacctgagtctgcaacgactccgccagcgttttcgatgcctgcggactgaccacccagtcgtcagaagatatgactgaaattcgtttatcagaaatctctgtcagcttagtataatccagaggatactgaacatgcgcctccagctcaggcagtgtttcctgactgcaatcaaaaccggagactaaaatataaccacccagttttgtcccttccggaatatgttcagtgatatatcgcagcaccgtaatacaaccaagactgtgcccgacaaaaattgtattttcatccgctgttatattgttgctgataaggcattgctgccatttttgcggatcaggagaatgcggttccggcatcgcaggaacggcaactgtggcaccaagcaattccagttctttttttaaccacggaaaccagttatctgccggtgatgcagtataaccatgaacaataataacgttttttcctttcactctcagccccggtattcaggttgaattttcaacatattggttttatctgactgttttaatataacatttcccgtcatatttttagccgttttttagttgtttcaactaagagacacaaaaccattttccataaaaatctgttgtgattcagtctgtaacaggtaatcaacaaaagtctgagctatcggcgacattaaggccatacaatatattgctttgacattatgcgcctccgggatagctattgtcgcgagtccgggaagttctgacatttttttctgatagtgccggtaaccaataaatatatctgcctgatgagaatgaatcagccactgagacgccatttgtcccgcagggatcaccggggaattttttccgcccaccagatgccgtgtacgattgcggatattttccgccagttccggatcggctttactgagttcagaataaaactgcaccacataatccccacagggatcatcaaccggcgttgaggtaccgataattaaatccggagcacgcagtaattgctgccagtcaggatattgttcagctaattcaatggtggtggtaattcctaagtaattggcaataaaaggctcaacactgaatgctgtcttattccggagtaatgcttccggatgtgtccggtccgcagacaaaaacaggtcacactttaccccggattcaattttttgccgcaataaaccggccggaccaaaatcacaggttaccggcggtattttattaccggaataacgggttaaaatggcagtcagcgctccccgcagactgccggccgccataatatgcattaatgactgccctgatattgagtgcgatagaatttctgataccagttattaacatcagcatccacatcaatatcggcaaatttctgcggatacaatttagcagccatccaaagctcaccgattgccatcgcttccggcatcggatatccccaggctttggcatattccggcattaaataaacacgtttgtttttcactgcatcaataacctgccagcgggggtcgttattaatttcgtcaacaacgcccgggtagcgatcctgaataaaaataacttccgggttccagctgataacctgctcgagagaaacctgtttataccctttaatggtcgcagcggcaacattcattgcgccggcgtgctgcatcattaaaccggtatattttcctgatccgtaagtggttaaatccgggtttgccatataggcccggacacgctgactttcatggatatctttcagacgttgggtcactatattcctgctgtcaaaggtttgtttaatcagctcttttgcattgtccggcttattaacgatatcaccaatcagggtaatcccttctttcagcccgtcattgtaggcttgctcttcattatcaagctcaggattcacattatttttagcgtggctgctgttgtctttctgcagtgaaatggcgataaccgggatacccacctgcgtaattttatcgatcatttcctgtggcgcataattagtgacaaaaactacctgcggtttcaactgcaccagactttcaagattgacgcttttcagatcgcctacattgggcactttcactaattcaggtgccagccgttcataattttgaccgagctgctcacgccagtttcccatcacgcccacaattttgtccgttgcatccaactgaaccagtaaattcagtgtctgatgctgaagaacagccacgcgctcaacatgatcatcaataacaaccttgcgccccagctgatctgtaaactcccgcgccgcctggccggagaatgaaaaaatgacagcaataaacccaatcagatactttttcatcattattacccactttaaccgatatatacttggttatatatcgattgatttcatgggtcaactgtttccgggggtattacagcaccggaatgcgatattctgcatgccagtaaatgccccggaaaccaaaaatctgccgggacataaaaatcagcaacaaaccgataaatatcatggtgatcacaacaaagattggataaaggtacaaaatgaaaatttaatatatgggctccggaataacgaaacatgctaactatcaaggaattgcggagagtttatcctgtaaattatcgttaccaggtcagtctgtaactatcatcaattaatgacttcagttcttcactactgaactcagcatccagtattatcgtaacccagtgttctttgttcatgtgatacgcaggatagataccatcctttaaacgaagagagccaaccatttccggcgcagccttaacattaacaatatccactactttctctgcgtctccggcgcctattttatcagcagatactgacattatgatagcaaaccatttggcatttccgcggtgcctgaataccgcataatccggatatttaatccacggatagtcaggggctgagccgtaattagtccggatatattcaatcagatcgttctttttcatatcagcaccttaagtaaaccattaatggctatgtcagataccgatattacagcatttatcatggcgctctgatatatcctgtttttatgcagtgatatttttgtacaaattaaaaccagctcacaatatgttaagctggctttattgtgtatttgttcttcttaaataagaatgatattcattttttatatggtaatgaataacatttatgattgtattttttgcattatcagattgctaaaggctccatatatacaaaggagctttttactgattcagtataatcattctgagtttcaggaaacagaaattcataagacacatgaaatatatttattatcttaaatacaacactgacatctattttattaacacctcgttcataccttgacaactgctgctgtgagacccccagcattttagctaacatctttgtagtcaagccattacggtgtcttaagtcgcggatattctgccctacaataaaattaatatctttcattatgaacctcctgataaacatatattaaaggtaaagcataatatgctgactgacaaaccaagctatcaacaaaaaatatacaactcagaataattatctaaaaacaaaaggcattgacggaaaaaaatcttaaattattatttaacgacaagcaaaaagaccaattaaccccattagccttaattataaacctaatgccaagtatttatacttgtttatattacgtttaacttttggcaggtatattcggttgcagaagtcgcaagtatcccttccgttaatcaatttgcccggcaatagccgggctgttttttttcagttgtatctgctttaataatatccatcggttatcgtgtctgtttatccgacctggcaggtgccagtttgatatactttcccctccgcatatcatccccgtagtttctttttcccgaaggtatttaccaccagaaaatactgtgttctgtaccgaaagagagattacagaatatctttgatgctctcagcaagtgttgttgttggtcgtccaatcagtttactcagagtatgactatcatcgaataatcctcctacggacgcaccaacatcagagtcagcaagcatttcagacaactcatcaggcaagcccgcatttttcagtgcggcaacaaaatcagcctgacttaaattctgatacacaacattctttccgctctgttcagtcagttctttcgccaggtggcttaatgtccgggcctcatctccggcaagctcatacaccttacccgcatgcccgtcttcactgataacacaggcggcagccgccgcataatcagctctggcagcgaaagcgattttgccttctccggccgcaccaataaagacaccatgctcaagtgcagcaggtacactggccagatagttttccgtataccagccattgcgcagaagggcataccggataccggaatcagccagcattttttctgcttccacatgctcagtatgtaaacccagcggagaggtgtcggcatgtaacaaactggtgtaagcaatgaatttcacattagctgattttgccgcattaatcacattacgatgttgcgtgacacgctgtccgatttcactggaagaaatcaaaagcaatttctcaaccccctgtaaggccctgattaatgatgcttcatcattgtaatcagcctgacgtacagaaattcctttccggctcagggatgcaccttttgccggattacggacaatcgccacaatctggcctgccgggactgtttgcagcagattttcaataacatgctggcccaggaggcctgtcgcaccggtaattgcaatcataagatagctccttaatgtatcacttgtgtttcgttaacataacacctagacttacttaaagtaagtacatacaaaaaggtaagttcaacgtggcagcttcaacattatcccaacagttacgcgacggtaatttatttgccgcgcagtgcccttcccgggaaattcttaaacatgtaacaagccgctgggggatactgattttaatttcccttcgtgacgggacacaccgtttcagcgatttacgacgcaaaatcggcggaataagtgagaaaatgttagctcagtcattacaggcgctggaacaggatggcttcattaatcgcgtgtcatatccggtattaccgccccacgtcgagtatacactgaccgatcttggtgaacagataagtgaaaaagtcaccatactggcagactggatagagataaatctttcgaaaatactggcgcaaaaggaagataaaacagcatagtgctttacactattggttcccgggtcgtcaggcattattccggacgctttgtcccgttaaatttctgtccgcttttcagtggcagaaaatttacgatatcccttgtaaggaccataaatatcccgggaacgccatgttgctggctgttgttaccggacagcgccttgctatccctctctccctacggtgtcaggcactcaatatcagcctgcgggatgtgattgccggatgccgtgatctgtatgtcagcaaatatttagtccactacacacgaagcacatcacaatcacaacccggcggtcaggtaaccgcaaataccctgaccaccaactttaaaaaagccagggataaaaccgacatcaattggggagaaggtacgcctgcaacatttcatgaaatgcggtcattgtctgagcgtttataccgggaacagggaattaatacccaaaacctgctgggccataaaaaccagcagcaaaccgataaatatcatgatgatcgtggaaaagattggcatatagtatctatttaatatacacataccgtgaagtaaaccaaattattggtttaccattttttactttaacgtcttcgttaccatttttgtctacagtttttgctttaaacgttaaataataaagtccaggatttttaacatacagtgcataacttatgctcctttccgcagaaataggtacaatcagatcatacattggtgtgtgatcagtttttttatcttgtgaaataacctcataaaaattaggatgataagtctccaatgcttttattttatcattaacaaccttaacactctgtatagttaatgattctttatctaaacctatatgtattggctcagttccattattcttaatagtaacaactggaagaatatagaatccatcgtcccctttttcctctgtaatatttatagaaaataaagttgattctgtgccttttattctctcttgtatttcctgtaattctgcagcagccttatctctttgatttaaagcatcaaaagtataagccccccaaagtaacgtaaatatagtacatagccctacagttatattgctgaagttggaatgttcattccaaatagctcgaaaataatagactgtaagacctatgataaaaattaatatagcaataatgactatagacattatgctcatatcatccacctatatgcgttgaactaccatcactgggaaagtcatcttcctcaatattagaatcaacaaattcactattttgatttgcagcactcagtattaactgccttctaatgctcggaatatctaactcatactcaatgacattacgattagattcaatgagttcagttatttccgcgagattactagtataggtttgattggtaaattctaattcttgggctggacttatggttgtcaatattaaatataaaaatgcaactcctgcatatcttgattgactgctaaactttaaccacaaatcacctggtgacattaaaatttgttgagaagttaaatccagaagcccaccatttgaatatctgaccatagcatttttcagatcttcataatttatatttaatgggttctcatcatttgattgatgctcagaaatcatgatcgataaaacttgtattctatcaatcagttcagctaattgttttaatgtatgatgttttaaagcagcagattgctctatcctcaaactactataataatcattcccatcgataaaaaatgaagaaagccagtgaaaaacctccttagaattatcacctaaagaaaatatcgcttgatacgcattaaacgatttttgaattgttattggtattctattcctaggtataggatcaccccattgtacgtctctacgaactttaaatccttcatttgcaggaaatatatctgtagcataatatggatttgatttgataatccctggtattacttggctagaatttaatgtgaaaacaacatcaccaactttcatatcaataacaaagctctcaatttgaggcttaacattctttgctgttatagcattaaaaccttcaagtaaactagccttatttgcctgtgttattgggtcactaaatgtaagctcgttaatctgtagattatctaaatgtgctgtagcaattatctcattctcaataaactcactagcaaaccgatatctaacaccaggacgaactacccagcattttgatgctaaattaactattccaattttaagtggcatactcattatatcccataaataactactattaattctatttatatcatttagttatttattttgataacttattttgatagttttttgataaccatcccaatacgacaataaaaaacgggaactgataagctcccgttaactatttcactgtaaactgaattacatgtgtttgatgattgcgtcaccaaactctgagcatttcaggagcttagcaccttccatcagacgttcgaaatcgtaagtgacggtcttggcagcgattgccccttccattcctttaacgattaagtcagcagcctcaaaccagcccatgtggcgcagcattagattgaaatcactttcttaaccatatgatttaaataataaaacatcatcagaattattatcggatacaaacaatattctttttttcaaccagttgattattttatattttacttcggttttgataactggcacttcaaccaaaatgctacacagctctatctgcaatttgactcaatacgtttattcaatgtcgctctatgatcaaaacagctcgtacagcaacaacaaatctttgcgcctcttatgccttattaacttttcaccaccggcagctgactgaaatttgtcgtgtatgccggtgacagcatttcacgcttcatcctgtacccgctgtcactgcctttaccggcaaaccacacgcggcccagcccactattatttattgtgtcgatggtcttcatcagctcatcgctgtttttgaatggctgccgggtggcgaacatatcgaactgggtgacggctgaatcggtgaaatctgacagaatgatgcccgccttataataccggtacccgtcacgccagatagtatccagtgctctcatggcggcattgatgatgtcccgcgtgtcgcagctggggtactcgagtgaaatatttgcactgttcgcatagtccggcccattcgcgtgtctgctggtctgcacaaacagccctatcatccggcagcgctgcttttcttcccggagtttttcggctgaccgctcggcatattcacacacggcctttctcatggtgacaatgtccgtcactttgataccgaatgaccgggagcagaggatctgctgtttcacctttctgacttcttccagctcgatacagggttccccgttcagttcccgcagcgtgcgctcagtgacaacaccgaatgttttacggatagtcgccggtgcggcgttcgccaaatctaatgctgtgcggatccccattgtgttcagtctggccgatatgcgccggccgattccccatacctcgctgaccggcatcaaagccagtaatttacgctggcgccgcggatctgaaaggtctaccaccccgccggtttttttccatgtttttgctgcgtggttggcgatttttgcgagtgtctttgtcggtgcaataccaacgccgaccggaaggtgtgttttctgcagaatggcagcctgtatctcacggccgtaatcttccaggctgaatgtcctggtcatgccagtaaaatcaagaaaggcttcgtcgatagaatagatttctgtggcgggtgcgaaggatgagagcaatgtcatcacacggctgctcatatcaccgtacaacgcataatttgagctgaatactgtcacattgtttttatgacaaaaatcgcgacactcataatacagcgcccccanacaatatccccctccgccgcagttaccgcactgtccacgataaccacatcactgtcaaagatattcgcatctatcatcgaactaccttcaaccctgagtaaataggtactttccgggtgtcggatcagttcactgttcaggtttatgcgctcctcgatatagtccgccgccggtgacggaaacccagcgggaacatgctccaggaaaagaggcaatgtcagaattgtatcatcgttgatcttgacaagtttcatactcagaatcgattaactgtatatatatacagttaatgatagagaagtttagctgtctcatcaatctgatttttactaattttatgcgtcacatgcattactcattgaaatcaaatccgacagtccgctatgagcaactaacgactcgagcttagcttgcaagcgtccgagcgaccgtagggagcgaattttatggccttgttacacgtttagcctggatacatgtttagccaatttctcctcaatctgcataagccgaagaataggcgattttaactcctttgtttctttggcggcatactctctaagctgtgataagcagttgaaatacgctcggtttatgattggttcaagttcaacaccaaattctgtacgtaaattctgctgaatttcttcaatatctctcatttggttattctttgcacccataccttggtttttgactatgggtgaccaaagcataaaatgcttttcatagccctcgaaatacttgtttgcatattgaatgttttttcggaactttttggtaaagcgattcacgttgtcagactggcaatctttgacatactgaagacccgttactaaatgggtagcgacctcgcagatataaacaactttgttttcaggatttataccaacaacgtcaatttcaccctgaacgtccggagtatataggttgtactcaacgaagtcgcagcccagaaagtatttaagatactcacctacaatttcttctccaggattttgcactctctctccttaaaacgtgtaacagttattcggcggaaagatccgtatttaagtacagactttttcaccttttttaaatttaatgggcagaacactacaccgcctttttataactgacaataggttataggttcatctggtatttacatctgctacaaacacggattaatccgtctaaaagttatggcgatgccctgatgcggacaagatatttttgcagtgccaaaacgtctgcttttggcacggaactaccgaactaattgtggtgaaagtctgctgtgagcgaatagcggacatatgcatatttgttaaatatggcaaattttagctaccacttcccgtggttggcggttggtcgataacaggaactaatcacacaatataattcattgattttaaaacatataatcacttgtaatctgaagatatcctcccaaagccctcaatgacattttcaacttcgaaaatctctaaaatctacctcacttaacctaatctagtagaatcaaacgaaggctctaatctgttaaagggtattaataaaatgctgtgagcatcttgttgcaatctacttaatgagcatgttttcaaacaatctatctcattgttttagttatataaataaaacctcacaaattgcgatagcccataccgtattcccgaaagaaacgtacaaataatcgttacagctctcatttaatggctcattatgttgaaaacatacgaaatgtgtggaatgttttggattggtgtgcaggcagaattttgaattgtgtttcgcaattcttgatttcaagggctcaatctctcgctgctatgattctcatagcaggatctgctagtaatactgtaaaagtgcgtaggagtgcctgcacaccacttttcaaggagcagtgatgactacccgcttagaaaaattaaaagcatgtaattccaaaccagatttcgcacggcttttaggaattgacccagtttttatgacccgtgtcatatatataagaaatactgataatctatattcacaattcactattaaaaaaaagaatggtactgacagaatcatatcagccccagactctgagcttaaagaaatacaaagcaagctttctgatttattacaagactgtttaaataatctccgagaaaatttaaaagaagataattatttctctcatggatttgagcgcaaccgcagtattattacaaatgctgaaaagcataaatcaaagaaatgggttcttaatatagatctttgtaatttctttgatgaatttaattttggacgagttagggggtattttttaaaaaataataacttttctctcagtgcagagatttccacattaatagccaaaatcgcatgtcaccaagataagttacctcaaggtagcccctgctctcccgtaataaccaacttaattctagtttctttagacaggcggctaagtaatctatgtaatagtgttggttgtacatacacacgatatgctgacgatataacaatctcaactaataaaaaagaatttcctaagaaaatcgtcaaaagccaagatgagagattcatcaccttaaataataaatttcttaaggaaataatatcatcaggctttaaaattaatcagaacaaattaagacttctcgacaaaaaaatccgccaagaagttacaggattaactgtcaataggtttgtaaatgtagatagaaaatatgcaaaaatggctcgtgcaatggcacatagcctatttaaaaaaggggagtacacattaatagataaaaaaacaagaaatataagaactggcactatcaatgagttaaatggcatgctgagctttattgattttgtagacaaatacaacaacagattaccgcacgcgatcaaaccctcacataacaagcgtgaaaaagtatattcggattttctttactattctactttttgggcaaatccaaaaccaacaatcttgactgagggtaaaacggacattacgtacttgagggttgctttggatgcgttatcagaaaaccaccccaatctaattgggaataaaaaaatgggtaataaagcagtacgagattatgggattaaattcttcaaaaacacgtctaaaacaaaatatcttttaaacttagacggaggaactcaacatctaaaagaattcattgttgcctttgaaaaaaagacaggtgcgtttaaggaaatcgtcaatcaaaaacctgtaattgttattttagataatgactctggaagcggtggtgctaagggaatcttcgacactttaattggaaaagcgttccctaatattacccttacaaaagatgaactaagaaatcagaaatggacgtgggttacaaaaaacttatatataatattcacccctcttaatggtttaaaagatagttctatggaagaccttttccacagttctgtattacaaaaaacgcttggtggtaaagtatttaaccgaactaataacaaatgcaaggataatgaatacggcaaagaattttttgctacaggtgttgtgttaaaacagcgtaaaacaatcgatttttcaaaattcaattacatttttgaatcgatttcagaaataattgatcataataattccagaaaaattaatcaaagttaatattaatcaagattgattagattgccaattataataattagtttctgattgaagaagtatagcttagagtgcgtacgcttaagaatcaccgatggcgatggtcgtgggaaacaacttttgacaattaacttccataaccaactgacggacttgctccgcgttgataggcatatagttatgtcagctttgtccacttccggcacagagcggtctgtcaagattgctgcgcaatatccccatcagcacagctttgttttattcccctgaatctccggcctgatctgctgcttccttcgcctcacgctctgcctgctcacgttccatctgttcagccagttcacgctgtttcacattccacacagagtcctgcggcatttcgacacgcacatcaagacgggttgattccggcaaatcacacagctcaccgtcctgatagaaaatgcgctcaccttccggggtgacctctttcagccgccagttctggaaacgttccggcaaatgcgtatgctgacggtgacaggtttcaataatcagactgccgtcactctgcaccctatcatcgacataaaccagctcaaggccgttattatctttcggtacagaaataccgccgtttacaccccatgcgccatctgagttataaccaagaatgccggtaatgtgatattggccggtgccggtgcggctgacttcagcaccttcggattcgtcgttggtgtcgtaatggccatcagggtaaatctgaacgattggcgacgattttttataatatccactgccgtctacgatatacatattggatgtcaacacccttaccgattcccatgcagaaccagtataccgatgtatcgccatgtgcgtcgcgccgtagttgggaaggactatcctttgtccaatatccccggaatacctagttgttataacgcttccaaatctgtctcctatgacagaagggggattttgactgttctggttaaatctatacataccattaggcaaattggtattagtgaaatttgtcatatacggaggatagtccgcgtatactgacccccatccggttgcctgctgaatccaggagcgagtcgcaactacgccggtgtcatatggtatcgtcacaatgtgctggttttcgccgttagcctgccgatacacaatgctaagcattgatgctgtacccgcatgaggatttgtctccagtcgcacatagcggccatcgatctttactaaatccagtcctgtatattctccgtcactaaagcagcgggtggagccatccgaaatcaacgcaaaacgatatctgtctgtgacggtgtctttaaaaccgactgttcccccgtcttccagctgaacaacattccttttgttcggactttgtacgcgggtaacagcagaatttggcttatacagcatctccccgacccattccctcgaagccagcccttttacatcctccagtgtcaccttctgcccgttcggcaactcaatttccacctggccggtgtctgtcatccactgctgcattgcctggagaaagtaaacgatatagccctgattggctgacatggtgcgggctgcatccgaaatggtatccgggactgtggtggcaatggagtatttcgcaccactgagcgttaccggggcattgaatgacaacaccagttcggtatcactgtttaccgcgcggatcatcatgctgaccggtgctataccgttctcgatgctgataagctggcccggggccacaccgtgaatgttctttttccactgcgtaccagtgccggtcacaatcggtgaaccggcattaatggctatggtgccgtcggtgtaaatcatggggtttccttaaatttcagacgaaaaaaaaccgccggagcggttgttggaggagattatttattttgattttagttttgcggatcgaagtaagcgacggtaacggcgataatcagtcctctgtactcttgcctttaacacatgtaattttgtcaaacgtatccatgcggatccagccatgcaaacccagaacaggatcacctgtactgaaaaaccgtttactgtccggcgcatattttgtcagcttagctgaataatgccggttatccagcccctcaaacatatgcccggtgcaatccactggtttggtgtatacgttatggctgcaggctgtcagcgtagttattgcagctaatgtgattaattttgatatattcattcttatatccccgttgtatctattatcattatatatagcggtatatcacatgatttaaaagattgtgatgcatgcggtctggaatacgtatcaaccaacagacgtacttccagtttagaaccgttcattcgccagaaataagactcgaattccatatattcatcataatttgttcttttctgagcaccaccgccaaatacaactgcacagttattaccattattaggcattgtcatagaccacattgtatcaggccatagtttaagccgctgaacatgcagtatatttgcaacgccccagttagtattatataccacctgattggttagcgggtttatcacaactattcccgttttttgattacgcaccttaacaggagcgttgccaaactcccagatttctatatttccgccgggaccgtcgcggaaaggcatcgagacaaaagcattgttattcgtattgtcaaacgcctgaccgcctattctgacccagaatgatgctctggctgcgatcatttgtgttttcggatgaactctggcaggaaaataaacctctttaatggttccctgtcctgcatcctgcactttcggacaatgaaacgactgttttctgattagccctaacgctatattagtgccgtcaatttgcatccggccggtgtcaccaaaacatataaaaccgtgtttcatgattttacaccatataatatacgcatataagtttccctggctctctgttcgtcgtttcgccttaaattaccctcaaaaataataacgccattttcaacccggcaatcgcaccagccgttatgattgaaccaaaagctcggattaacccagacaaaaatctcccccatagggagcaggttccggtgatcccagctgtatttaaactgaccgaccggtgcaggattaatatcatgccagccgacgaaccgaccgagtcttttaccggaatctaatattttattaccgcgatcatcatatacaataatcccgtgagccatattaataccccgatatatcaccaataatgaccgtcagccggttattgtcatatactttaataccgcccgctgtaataccggtaccgtttgttgttgttccgtcaaagaactcaaatttattagcctttgcatccagaataaaaccctgtttacccggcacatagttctccgactgcattttgtcagtgacaaccacactgttaagccatgcctgattaatgaacgcctcacgcataaagacctgtccgtccttcatgtacatgaacatgtccatcgattttttcaccggattataaaacgcaaactgctgcgcgttaaacccgataagcgtgttcacctgaccgcctttcagctcagccccgatcaccataccggcggaataatcctcaccgttataacggatccggactttcatatcgtgaacaacggatgcttcaccggcggccatgtcccactgcgcgcgaatggagttttgtgccatggcgaaaccgtcgtctgcagtcaccttaaccgcgtccagtttctctgcaagtgccttcgtttccgtgaccgtgtagttgcggacttcgataatctcggctttcatcgcgccgctttcacgctgccagtaaccccactgaccgtaagcgttgttggcgttgttgataatggcctcaaaattatcatccgcctgcgactgcaggtctttgatgatttgtgagtcgcccaacccggcggccacgtcatcaataatggtcgatgcatcgaactgggccacaccgcgtacaaactcagtccagggagactggttgccggttttatccaccagcctggcgcggaaataaaacgcggtaccggcggccagaccggccagttcgtgagagcgggacgggtacggcacatcggccaatagcaacagattctggccatcgttggttttgctgtactgaatttcggttttcagggtgtcttcggtgaatttcccgaattcccagttcagtttgatcccgaataccagtgtggacgcacggaaattcaccggcactggcggatctcccgccttgccggtcagccgggtttcctctgaatacccccagccgctggagatttccgctgcgttgattgccctgacccgcaccagatagcggcctgaatacaccccgggcacgtcaaacgaagtggtggcattgcgcggcacattgatccagttgccgtcatcgcgccgccactgcgcctcataggcaatggcattctccgccggtgaccaggtaacctgcatggtttcaatgctgatcccctggttaacgacagaataagagttaatgatgatatctttcggcgggaactggttgccgggcggaataacactgaccggacgttcatcgagtaccgcgccggtgtctatatggtcgtatttgtccggatcatgcatggcagcggatatcgtgaatgtgccatcatcattttcaatcacgctcaccacccggtactgctgggcatacagctcgtctgattctgttacccagacacattccggctccggcgtttcactgtattccgtggtaacagtgatcacgttatctgtgaccatctgaatagtgcgggcctgtgatttgccggatggcagattcagcatcagccggtcaccaggcgcggcatccggtttgcggtcaagtgtgatactccggccattcaccgcactgacgcggccaccggtcactttcccggacagattttcatccgccacagcaatgatgtagcccggctgcgggatattaccgtccagccccacaccgaatgtcactacccggtctttgttattggtgagaatgccccagcggcctttgcgattggcctctgactgccgggtacagccgattgccgtcatttccagctgattaaagccgaaccggtaaaccaactcattttcaaacaccggctccatcgcatcggcatagccgttcagcggatcggagtacgacaccagcgcggaggaataacgggccttactgctgctgccggaataggtgaaacgcccgtcgagcacgttggctttggtgtagctgtaatcaatgtcacgcggcatatccgccagggtgataatctggttgccgccccagtaggtcatgccacggaagatggccgcaaaatcacgcagtacggtataggcttcattgcgatcctgcacatacacatcacagatatagcgcggttcagtgccgctgccgcccttaccatccggcaccggctggtcacagtactttgcaacacggtacagttcccatttatcgatattctgcattttgatgcggtcgccgaggccgaagcgatcggaaaccacgatatcgtaaaagatccaggcggggttattggtccacgcccacttaaacgaaccatcccaggtaccggaatacgtccgttgttccggatcatagttcgacggtatacggataacccgcatcttcggctcacaggtgacctgcgggatggagccgttaaactgttttgagtcaaactcgatataaagcagtgcggtgtgcggataggtcagtttggcatcaatcacctcggtgtaactctgcagcaccatggtgtcgccgatttttgcactgttggcatcttcagtgattttccgcacccgaagtgtccaggatgtggccgactgcggcagatcaatacgatgagtccgctcataacctgaggtggttttacccttaacccggccgtccacaacggttttccaggtaccgccatcagtctgcaaatcaatgacatatttcacttcgttaccgaccatatccccgttatcctcctgacggaacagggacggccatttcaggcggacgcggaccgcggacaactgcgggttagtaaacgcatgcgcccacggtgtgctgctctgcacggtggtaccgatggtgatttcattctccgccgccggcatcccctgaatgtaggtttgtgcctgggtgccgggacggtattcccacaccacgcccgggaagttttcagaaccgtcagcattcagcagcggggtaccgtccagaaaaatagccttcccggtcagttcaccggcaaattccccctcaccgagggcgatcagtaattttgctttggcaactgactgtaaatcgtccggctgttcgacgggcgtgcgtgggctgccaccgccgcctttgcggcctgtgatttgtgtcattatgaatttcctgctgaaaaacggagaaaggattactgctgatcttcgacgtaaataccggctgagataacggctccgccgatgcggcgtttaccgtaaccgatcggtaccggataaccctgagaaacggtgttcgtcggtgcgccgaacgcataggacggtttgttttcgccctggtctttcatggcaagcccgcccggctgcggggacagcatctggataatgccgcccaaaatcatggatacgccggtcatggccaacccggtatgcatcgctccccatgccgccactgacgcaccgcctgtccagaacgcagctgccaccatcaccgcgccgaaaataacctgcagcaatcccccgcgtttgctgccgatcacaacaggcacaatccggataacatcatccgtcaccggaaaactgaggtcgtccaccccgatattctttttcccgcgaaataccgcgtacgttaagccgcgggatttactggtattcagatagcgttcaaacccgggaattgtgcaacataaagcacggaccgcttcggaggttgtgctgaccaggcgctgatgtgttttgccgaaggttttacccagcacaccaccgagtataattttcaccataatttcctgtgacatatttgccccgtaaaaaaacccgccggagcgggtcatatcagttgctcatgatgcagtaccatcactgtacgatcacgccaataaccgccatacggcatccgctggctcaggtgtccgtacaaatgatgaagcagcatattatcatccagcagaataccggcatgattggcgaccggtgcctgcacctgcatcacgatgacatcaccgggctgcggatcatcgacctgaataaaccccgcttcccgccagttatcggcgtaacggttctcaccctgctcccaccagggataatccacccggtaatccggcagttcaatgccgtgttcctgccggaaccagctcatgaccagcccccagcaatctgtaaacccgagcacaaacggccgaccaagtaatggcagttcgccgcgcggctgaacagtccgcagatccccctccggccagctgacgatgtaccacggcacgccaagggcgtcacactgtgctttatccagttctgacggctgagtggtagcatccgggtgactgtgcacaataccggtcaccgtcccccaatcctcagcagcagcgtaatcctccggcgataatacaaaatgctcttccggtgtggccgcgatattacggcagggaaagtatttcaccacccgggatttttgcgcgatcaccccgcagcactcgcgggggtattcacgttctgcgtgtgcaaaaatggccgcctgaatgtttttacgcatcgttatttcctcagcaatgaggttcccggaaagccgccgaacgggatcggattatttttcccgaaacggggaaagcaaccggtattcagcatgccgctgcactgatcctgtgccgggtcatccacgcggttgccgtgtttgtcaaaatacccgttctgcccggcataatcacagccgtcaccggatttgtatttgccacgtatgcaccaggtacacattgcatgcagttgccgcgtcgggatcagtaccccctgcaaatccatcggactggctaaatcaaactcgataacctcattggtttccgaggatttgctgtcgatataaaagaccgagactttttcctgggtaggatctgccgacgggttaccatccggaaagtttgctgcatccagataatgcgccagggtatcgtgtatcgtgactttcgctttcagcatgtcatcgtatgccagacacagcgcagtgactgaaccatcgaggtttgccactgataacttcggctgcgcgccggatccggtggtcgacgcctctatcccgtcaatcagcaccggccacgcacggtactcttcaccctgccaccagatggatttcgccggtaattttttctgatcaccaccggcggcagtaatttctgcctctgtatgtgggatgttgtatgcatggaaccgcaaaatatccggcgcaccgaatgcggtactgtcaacctcaaaaagccggacggcattacccggttccagcttctggtagtcatttgtgatcatggtttaaatgcctgagtaaaagtgagagaaagtgaatagttgtcaccaccgagcggggtgagcttatgctcgtcgcaccggtacagaccgaccggctcaagcggaggtttccactgaaaagcctttataccgccgtgacggtcgataaactgacggatagccgcgatatactccccgcggccggtaaattccagtgaccacttctggctgcggggattaagaccgtcaccggacacctgctcataaccatcaccgaacttcgccctgcgggttttataggtgatgtcctccgtgggattaacacggggacaccaggtgaatgtttcgatcatcttttccccttagtcatattccagactgcaccaccagggcgggtgtctttgtccattagtacgcggaaacgctgatcgacaaatgcggcaatttcattaccaaactgctcataaccagccgacgactgcgtctggctgctgccgttactgtcgatggtaataaacacctgtggtgccgctgaaccgatgttctgatttccgccaagcgcccggacacccagagagccatccgccgcccgtgttaacggcataatcgcttccggcccggcctcccccatcagcccggcacctttggcaaacgcaaaataagtcggggtgctgactatctgattactgtacgcactcaggcccggggagtcataaaccccgcccttggcatttgccgcagcacctcccaggaagtcaccgacagcaccaatccagccaccgacaccagacatggacttaatgctgttcacgatggcagcgttgaccagtattttctggatggatttaaggacatctattgaccagtcgcgccagctggctttgttaccgttcagcatgtcagtgatgttattcaccataccgcccatggcgctctgtaccgcagatgcggtttgctccgcatagtctccggcctcagcaacccagtcttccatcccccgggtaaccccgctggtccagtcagactgaacttcctttattttctgatatttcaggttgagcgcgtcaatctcccggttataagcttcggtcgcactttttccctgatcagatttggcataaacacgatcaatctgctggcgctcttcatacaaactgcgccggtttccgcccatcccacgggttttatcgatttgttccgcttcatcactgaatttacgggcaccgtcacgcatcgctttcagcgcatcatccatttcacgctgctttctgaccgcctcgtcggccttttgtgtccactccgccagggcaacagaggatgcgcggatcgcttttcgctgctcatccgtccatttggtaccggcctcatgcgcagccgcatacagctctgcggctttttctccctgcgtggccctgactttctgaacctccgtagccacactcagatccgccattttacgggcatactgctccgcctgacgttccgcttctttctgctctttattgaaagcactctgggcgcttttacccgctttcagttccttactcagcttttcctgattccggtaggctgccacctgattatcaatatacttctgccggttatcggcaaattcaggtttattcagcagaccgatatcatctgcggcaaactcagcctgccggataacacgggcttccccggtcagtgcggacagttctttgtcccgctctgatttctgaatgaaatcctgctgtttttcgctgagaggtgccgccgggatacgcatcgggctgttaaccagagccaggcggttggtcaggatctgatttccggcagacattatccggttaaattcgctatgctccgcattcaccatcagtaatgaatgacgcatattattctgggcagcagactgctgacgaataagaaaatcacgctgactttcgaccgccttcagtgctgactgaatctcttccgattttttgctcagctcattaagtctgctctgttcaaccgaaagctcatcctgcgcagccgccagggatttaaccgcatcttcctgactgataaggtggttaatcagatagccgttgatgctggggccgggtgaggccagcatctgctgatatcctgctatcgctgattttaatccctcgactttctgacgctgctcatcaaccagtttattttgcgccgccagcgattctttggttttaccggagttatcagcggtttccggcagcgtcattttattaagattggcacgaacctggtcaatggtggcggcgtattcaagtgcggactgtcttgcctgctcctgcttctggtacatggtgtaccaggcaccggcccccagcatcaccagccccggaataccaccgaccagacccagcgcaccaccaagaagacgtgaaccgacagatgtgacgttattcaggttattttgcgcgatatttcgggcatttatattgcgtgcaacggaggcctgtacagcggccagccgcttttctgcgcctgcctgtgcatcggttccgcgcgcagctgccagtgatttttgtgcccggtactctgccgcacgcgctctggcaaccgcaatttgtgtcccgcgcagctgagcctgtgcaagagcgacctcgccttttgcggcactggccaccccgatggttgctttggtcacactggcggtaagcccgccgaaataccgcgcaaggccaaccccgaccaatgccccggcaacagtggcgatggtgtctatatttcccgcaataccattcagcgcgccggtcagcgtgctggttgcgcccgatgcctcattagccccgcccacccatgccatgaaggcgttttcaattttctgggatgcgccgctgacagtctgcggtaattgctcaaattcttttctgagctgttcagtgctggtcagaattggcactatcttgtcaatggtgagcttaccactctgtgacatttcacgcagaccgccgatggtcgttcccatcccgtccgccagcagttttgccagtcgtccgccgttctccatcaccgcgttaaattcttcaccgcgcagaacaccggatccgagagcctgactcagctgtgtaataacagagctggcttcttcagtacttgcaccggacagcttcagtgaagttgcgatggtttccgtgacttttgccacatcccccgaggcataacccgcatcacgcatcgactgcgcaatacgcgcgtacaggttggtatttgccgccagtgatgtgccggtacgctgacttaacgacatcagctcctgctgcgcccggctgaaatcctccgcagacacagaggccagtttgaggcgtccgcttaactggctccaggtatcggcataactgataagctgctgcgtggcaaaagcaccggccatagcccccattacgccggttactgtcgattttattgatgacagttcattgttcagctcactgattgcccgtttcgtttcgcgtgatgccgatgctgctttgcggccgccctgctccagcgtccggtaataattctcccccatccgtgaggcgcgggctatttcagactgaaacgaggatgaattagccgatattttaataataagctcacgaagcttcgtcattacttccccgttcagaaaataaaatcaatgttcagaaatagatccgagaaactcttccagactgtcaccgggcggtctctcatcctgagcgccccatttcagcatcgcatcattcaggctgagtttgccgccctgtgcgccgtacagtgatgagacaatatgggccgtctgtatgtcactgcggatgtccccgatcgggctgaggcggtcaaaagccatccacatggtcagctcaccggcgctcatcgttctggtcagttcatccactgtgcgccccatccggagcgcaagtgtcatcagaaaaaacatcccgggctgcgctactttttttccgcttcatccggcgtggtcatcagatcaagtgcctgtttcagcagacgggcatgaaccggcccgtaaacagccatcacttcttcagtgtcgtcatcactgaacacccgctctttatcttcatccagcagcacatcagaaaacatcaccacatctgcacgcagattgcgctgcgcctgttctgcctccgacaactttttatcaccctccccgtcggtattcatcagctcacgccatctgagccaggctgccgaagacggttcccgcagaataacggcgataccgttccattcaggtaccttcaccatttttgagcggaaggcgttttttggactgagtgccagttcttttaatgacagtttcggattcgccacggcttattccccctttcccggctcagttaccgtcccgtttttcagcggaacaggcttacctttcatacgcagcgtgaaagacgcggtgactaccccgctggttgccacactccagctgttctgacggacttccgccaggaaggcataaccattacctgacggaaactccactttgaacgcatggatcgtgtcattgtcataggcagcacgcagcgcttcctgcccctcatccggtgaccagttaccagaaattgtgacctcccccggggatgccaggccattagtcatttcctgctcagtcgaacacagggtggtgacgtcaatgtccgatttctgtccgccggtataaccgatctctttggccgcacaggccagcggcagaaactcagcagatgcgggatttgcttctgttgccggcagttttgaaatactgattttcgtgccctgcgttttttcatatttgctagacatagttattttcctgtaagcataaaaaaagctgccgcagcagcttgttgttcaagactaagttattgccagacctgacactccagcgtggcccggtaaagcgcagtatctgcttcatacccctgcttctctgtgaactccgccggtgaaagcggagaaatagcagcaacagacagatcacggattttgcgggcttcatcgatggtttttgcatacacatcaatctgaatattagtcatcgtctcagcacggccgcacatcacatcaccgatgacatcataaagtgaaaaaatacaccacggcggctgaatttttggctcatcctgcggagccacatacgggaaaactttgccgggcagcaccggggcaagtaaagaaaacaaatcagattctttcatccgctcagcaccttatcgatagcctgactgagtttactcagcgccaggtccgcggcctcatccgccttaccatcaaatgtcgggcggataaacggttgcggtgccatttttgatgtaccgttttccagaaaacgccagtaaaacgcattacgcgggtcatccgttttcagtgtgttatcactgttggttccggcggcgttggttccccggatgtatacaccggagacaacctcacctttataacggctccgctgaccgccggtaacgatattacgcgccagttttccggtcctgacaggagcgctccgccggacctcatcccgcagcatatccgctgcggctttcgtcgcttcccgcagcacacgggtattttcagcccggctgagtgattccagatcacgggacagttcagcaaaaccggacaaatccagccccatatcagccatctttcaccccctgtttacacagcagttccagccgggtaaatttcacatccgggatcacaacctgaatatcgtagacctgaccgcgatataccatccggcatgcaggatgaatatccggccggtaccgcatccatacgcggaccgttatttctgacatttccgctccggcggtcagcagttcccggccactgacgggtctgacttccgcattcacagccgggccaatatcaacccataacttttctctctggccagacgggagtattatgatttcagctctctgaaatacaacaatatgtctcagacgaccagcctgcataatttcatccttacggcctgcgccggtaatctcttaaatggcggtacaaagagtccggtaatgactgcccctcccggttttcataccaaaatccgaccatctgttttaatctgagcgctatatccgcacttaaaaacaaggtatcagggtcgtctttatcaggtttttccggggtaagctttctgttagtgacccgctcaacttctgatacggcagcactcaaaaattgcagtaaaagatcattatcatggtcaccatcgatatagcattgccttttcagctcttcaattgtcggtaatgacatgaaaccctccggaaaagcggcatctctgccgccgtaattaatcagcctcctgcacctgcagctttcagtaatttcacagcattactgtccaccatcatgctaccgacacgcttcgtggtatagaaatgcacaaacggcttgttggtgtacgggtcgcgcagcatacggatgccgatacgatccaggatggtgtagcagcgtctgaagttaccgaacgccagcggaacagcaccggcagccatatcagcaaactgctcattttccgcaataccatatcccagtaatgcagacggctgacccaattgcaggcccggctgccacaggtaattcccctgggaatccttcagtgtgcgcactttgaataacgtattgttattcatcataaacttagcaccgttacggtatggttttcgcagtgtataaatcagtttcatcacatcatcagcggtcagttcggtcggtttcttcagcaacaggtgttgcaatttgccccagtcacgctccttatccgctttatcatcactgccgtaggccagcaatcctttgggctttttgctgccgtctccgctgatgaatgccgcttcttcctgcgctgcaaattcagttgtcagttcaccggtaatgaactgctcaacgttgaaaaaggcatcatccagcatggtctgagtcgccgccggattgccgtaaatttccccccacaccggttcaatggtaccgagttttgacgtgctggtttccggacgggcatcagtctcaccaacccaaccgctgccggtacctcccatattcacgaggcgcttgtaattcggcgtgccgactgagacaacattacattcctgacgcataatgacttcgtcacgcagagcagaaataatattgcgatccagttcttccggcacggcataaccaccgtcaggatcagaaccaatctgcatggctttctgttccagttcggccaggccgtcatccttacctttgcggacaaacagttcgaatgcacttttgtgttcagcaacatctttgtttgccacaccacctgccgggcgtttcacggcggccagctcagcttccagcgacgatttcagctcgtccagttcggataatctgccgttcagagtttccactgactcggccagtctgcctttttctgattcgatggcatcaatacgtttgtcattttttgacttaaattcttcaaatgacgctttcagctcttttgccacttcactgatatctttatgatcaacagccataacagccccttactgattaaaattaatggatttaagtgtttccagtgcatcttcctctgcgtcacgcagagagagagcatggtagccgtcggccataaatgccttagcctgtgtccgcgacagtccggcatcacgcaggacgcgctcaatacttttttgtgacgggatgtcaccacgggcaaatgccgatttaacatcactgacccgggcttcatcattggacgggaaggtcaccagactcacttcccacagatcgatttctttcaggagaaacgcccctttactccggtcgtactcccagtctttcaggatgtagccaatagaaaggccggataatgatccggccttcagatgtgcatgagcccgttttgacagcgggtcatcctcgataagcagccgccctttgacatacaggccggtatcatcctcccgcatttcggtatacacaccgaccggttcggaaatctggtgctgccagagcatggccggaagaccgcccttctcccgccattcactaagtgatgcctgaaaagcacccggcacaacaatatcgctgtagctgtctttcacgccgaaaaccgatccgtatccttcaaattcgccggtttcagtgaccgactttattttcagcggtatgtccagccgctgtttagtcattatcgacatcctgcttttcctctttttccgggctgctctcaggctttgtggtcatgttcatcggtgtcagccagatatcaccaccttcacgcgggttgagctcttccagttcccggcattcattgggtgaatagatcccccagttaataccggtggcataagcatcaaaccgtgatttcatatctccgcgtaacaatgcccctgcgttgaatttcgcgtaaaaaacaccctgttttgatggtttcaccagtccggcattgatacgttgttctattcgggtcagataaggcaccagagaataattgataaaaccaatcccgagattctcaatgttattgaaggtagcccgatctgtgttctgaatcatatgcagcggcacacggaaaatacggcagatttcctccagctggaatttgcgggtctcaaggaactgtgcgtcttccgatgtcatactgatttgctgccatttcaggcccatctcaaggatcatgggtttatgtgcattagccagtccctgatgccggttttcaaagtcggttttcagccgctcccaggcatcgtctttcaggtactggtcagtttgcaggacaccgctggttaccgcgccgttcccgaacagacgtgagccgtgctcctccgttgccagccccagcccgaccgcctgttttgcatacgctatcggactgagtccggttaatccgtccagggtgaaaatccgcacatgccagatatcatcctgtgtcagcgtgtcgtgccttccgtccggaaaagtaacctgatattcaggttcccacttactgttcagttttggagtaactgaagacgggtccagcggcagcagctccaccacctcacccagcgctttgactttgtaagcataaaaattgccgcgcagacacaggcaggcgatcagtaattcccagaactcctgcggtgtcatgtaattattggggtttacagataaaagccggttaagccgttcacggacagcccggcggttgcctgtctccagctgttcatacagagaacacggcagcatgccgactgactccgccagcacgcgaacgcagctgaatactgcggtaagctgcatcgccagttgcggactgacgcgacggccggaataggtgtcataggtcagaccgatcatttcgctgagctctgacgaactcatacccgtatcggattttctgaataaaccgggaaagaacattatgatcctccgttgttattcaggcttcccgctgatcttgataccagatatgaccagagcaggcataaaccgccggcagtgataaacccggcagcaggcatcagcagccaggcaccgaacgccagcagacaggcacccgcaacccccaccagcagggcggtaatagtcagtaatttcattggatttcctcagagtgaacgtaagcccctggaagataaaacatcggacaaactttgttcctgttccccgccgttcaccatctggcgtgatttggcagtaaacagggcaaacggcccgtcaattttgttttccggtgtcgatttgttcgggaaaatgttgtcatttctgtccggttttaccgtcacgttagacatcatccaggacattaccgggttgtggtcatggtgaaatttgccggaatatacatcggcctgaacggttttcatcgattcagacagatttttcaccgtctgcgccacctccaccagcggaataccttcttccgccaggcggcgggagaactgaacggcactccacgggtcaaaaccgagttcacgtaaatcctcaccttcgcaccatgccagaatgtcggctttgatgatgtcgtgatcgacaacctcaccgtccgtcagttcaagataaccggcagttccccatttccggtacaggtcagcgatatgcttcggtgcagtcactactctgtcctccggcagccagaatttgcacttcatatgcagttgtccgcgcggatcctcatacactttaacggctgcggtcacatcgattttgtttgacagatccacaccaacccagaccgggtaatttttcagctcatcatccggcgcattttcagggcagctgtcccacttaccggtatccatccaggcggattcggcattcacccacatattgaggtgcttggtcaggaaattaggccgggccgcaatctgctctttggcttttttcgccaggcggcgcatatcatcaaagcgcttacagacacccagccccgggttggcctttatccagacagattcatcgaacggatcatcatcttcatccggcgtgtaaattgccgcaaaaaaggtgtcatcttccaccacaccgcgcagtaccttgatggcgtaatcccgcagttcgtagcagataccctcgcggttaaatcccgcagtggtgatcgcaaacagcagggattgcaggcgggcaccggttgcagtttccagcacatcccacacatcacgggttttgtgggcgtgaagttcgtccacaatgccgcagtgaatattcaggccgtcgaggttatttgcgtcactggacagcggctcaaacttggatgcagaccgctcctggtaaatcgccagcttattaaattcaaacaggcggcagagtgagctcctggcctttttgaccatgttttttgcatcttcaaacacaatacgggcctggtcacgggtggtggccgccgagtaaacctcggcgccaccctcaccgtcagcgccggtcatgtacagaccgataccggatgaaagggtggatttggcgtttttacgcgccacttcgttataggcagtacggaaacggcgaaccagtaccggatcgccgtcatcgtcgtgctgagcttctccgctgagttcatcaaccagcgggatcacaaagccaaagatattaatcagaataaaggtatgccacggcatcagctctatcggcttacctgccagcgcccctttgacgtgcgggacaaactggtaaaaatccagaatatgctgggcgcgttcttcaatgaaaaagatgtcgcgctcagggccacgctctaaatcatcaagaaaccgctgacacgccaggcgtatcagttcgcccgtaactatttctccggcaaccacctgctcggcgtaccggatcccgtctgctacggttgccattcatcattttctttgtttcagaaatgcctcgaaagggtcttcttcggctggtgtgttaatggttaccttctggcgggctgccggggtcataccgaactcggagagcatcgcgcggatccgtttccatgcatcagctttcattgccgccaccgggtgtgcttttatcagtgggccgccatcactctgtgttgtgtaggtgtaaccttcttcgtccagagtatcgcagtgttgccggtattcggtgtatgcctcgatcagcagctccagcgctttggcatccatcgaactcatcacgcccatggcatcgagttcttccccaatccgcttaaaccagtatttcccctgcttggtaaaatgtttcggtgttgggggtacccctgaaggcggttttggttcttttttattgatcgggcgttttgatgggttacctctgaccaaacgcaggtgtgacggggttttcggtggtcccggcataatcgttttctcctgttaatacccctccggagaacccggaaaaaagttttctaacctgcggcgatgtgaaaaaaggcaaggcggcggtcctcaggcggtggggcggcagagatttgacctccccctcccctgtgcattgttgcggttcagccgcgattgcgctctgtcgccgtcttgcggtaatgacatggccagcacaggctttgcagattgctttctgcatcggttcccccatgtgctttgggagtgatgtggtcgactgtcttcgcctcggttacccgtccttcacgcaggcactgctggcacaaatgcttatcccggctcagaaccaccagccgcagcctgtcccatttggtgccgtagccacgttcgtgtcgactcttgccctgctgatggttctcccaccctgtattgcggtgttcttcgcagtatccgctgcggtctgtggttgtctttgcgcagcctcgcttgcgacaggcgcgtggtatacgtggtggcatagatttccccaataaaaaacccgccggagcgggttatgtatttgttacggtctttgccaggtagctctgtgttttttgcattcccgcattacggtgctgatacttctccccggcggagattccattgctacagtctgctggaatgatcctctctttggcgggtcaaggtactcaaatgttagctctccgactttagcccacagataacagtctattccgccaactactgacttaatttccgctgatacgatcgctattgttacatcgccaccgtgctcccccatgatttcatatttcaaaaaatcattgtcgtcattgtctatgtatatagttttaagcacattatgcagaatcatacaatttctcaccattgtggcatgtaccccgatactacatgatggcggcagactttcataagtctctattaacaccacccgtaaacgaccgtttgcagagtttgataaaatggttcgttgctcatatctgagcataggacataaaaaataccactgggcagtctattggagtgttactgcatagttatgtggttggtcagcaggataaatcattcgcatccctgatttgccgaaagcctgaatacagcgagcctcgaaatccttatagtcaagcgttgttgattagtacgcgaggttgcctgcatattgaacatcgcagttagaataaacattcttcttcaattgcattacatccttgttttaaaatgattttttaattttttaatcacattgaaaatacggaggtactgagggtatactcagtacgaaaataacaataactatttcctgaatcttccatatgcgcccctttattctggggcttttttttgcctctccgcttctatctcccgtattgccttcttatcatgattgcagttggcaatgtatttcatggcatcggccagcagctcaactgcgccaccgaacgtcagatcatccggtatctctacctgctcacaatcagcggtcagttgtggcggaatcggtatcaccggtgcgggtattaattccggtcgcgtatctgcgcaactcactgacagcatcagcgggaacagaaacagcagcgcattcactgactttgaaaacagttttgataaccgtcttaacgttggcatgctctgtgtcctcaacctgtttggctttgatgttgtcgagtgccacgcggtgtctgatggcaacagctgcaagcgtggtggtgtttatcgcctgctgtgctgataactggcctgagagtactgtgttactcactttcagctgttggttatcccggtaggtgtcatatacccaccaggcggcaaaaataaacagcgcggcaattaccgcttctttccggttcatagcgcttcacacttataatggatcacaccgtccagcgggtaaccctgcagaggcttacagtaattcgggagtgaatacagataacaacccgccaacagagcagtagtcagcaggatgatagcaatgatgatcaacgttaaggggttccgtggcataccgcgttctccgtatcccgccggttaatcagtccgtgccactgcttgccaccggcaaatgtccagcgcttcatttcgctacaggcacccgcgatatcaccggtattgagtttccgcagcatcgtcgagcgcgagaacgcgccggggccgacgttgtagacaaatgaatagatggccgcccgggtattgtcatcaatcggcaccttaatcatcgggtcaaccgcacgccggactttcgtcaggtcgtcatgcagtagcgctttacattcagcatccgtatacaacttgccaggctgaatgtcactgccggtatggccataacatacggtgagcactccggccacatcacgataaggcatatactcaacaccttcatatgcggggatcagcaccagcgcaccggcaattgccccggcagcacaagcggccattacctttttaaccaatcgcttattcatgatgttcacctgctttcaactggaattccttccgtttgtaataccagttaaccaggaacgtaccgacggtacagatgatcccggcaacaatggcccactgatccagagataaaatgccaaaggcagaggttataagcccccaggcatatgctgtagggctggaatatttgtcagacatgcgcatatccaccccctgcggagtgttccgtatgttgagtgatagggaaatgccgcaaccgggttatatgttttaaacaggttaaagtaaggtgactgcggcattattcggaatcccaccagcggcgggaaagcaataagaagagcactgtggccgaatacggattaggtaatgagcctgtcgtattccaatgctcttattattgcgggcaagaaaaaaggccacacatggcgacctttggaatttgttttatgtcacataagtgaaatttcagtatggacgataaaattgagtaaacataaaattaaatagtatgtagtttcatacattaccttgttacatatgctttttcgccggttgctactcaccggctttttttgtacctgtgacccgtcctgaataaccgaacatgtgaactatccggaaattccggagagttgaacctgtaagtaactcttacgagttggatttcaggcaataaaaaacctgtgggtgcaaagtttaagtttataagcaatagatatagggatcacccaatgacaatctctgtaacttatttgtacagagaattctctcccggaggtctggtcttaaaccttctgtgtgcccacaagtattgatccggagcatgcatgatttctgtctcaataatttgatttagcttctcagcatctgccgagtcatctccacgcggaaaatcagtaatttctttaccaattattaattcgtaaggcctcttaccactttcattatttcttaccatcgttgcagtaagtatcggggactttgataatttggctatagttgccacaccttttgatgttgaagccttcgctatcgaaaagaaaggggcgaagatagtgcctttcgttccaaaatcctgatcaggagcaaaccaaatagcctgcccgcgttttagttcagataccataaacttcagattcttacggtcgatcatcccacttccggaacggcttcggcatcttgtttgtatatactccattgctttattgttgtggggacgatacatcgcatttacaggaaaacacagccccataactctgcccccaagttccagcgacatggaatgaataccaataattaaaacaccattatttctgtcatatacatcattaaagttatcacaacccgttactctaaatatttcattaattcttttgtcattccagaaccaggcaataccggtttcaaataatgcaatccctaaagatgatagattacttgcgaccatactctctatctggattttatttctgtcaggaaaacataattctaaattttttttaattatggatacccgccttttcaggaacaaaccagaaaaacgacctaacttatcgcctaaaaacacaagccatggataaggcatctgaaccaaacagaaaagcaataggataccaatccaggttaaaatgtaccttgggtgaagaagcctgatagaaaatttattcagagaatacattttttcctgataaggaataattactgcataataaaaagacctgataatattatcaggccttggaatttagtttttctattgcctggacaacagcatcaccgttttacaaaaaatgcattttgcaccatgcggatttgatgcagaaacatcaaagtgcgaagtccggtattgtgttccactgcaacagggacactgaaaaaacagtgctattatcattggtgcgccttagagacccaccacatttgatgcagacggaccttttgccccgtcttcaatattgaaggtaacattctgaccttcaaataatgttttgaagctgtcactctggatcgcagagaagtgaacaaacacatctttgctgccatctgccggagtgatgaagccaaaacctttcgattcgttaaaccattttactgaaccagtcattgtattagacatagaatttcctttaattttttgattgccataaggcatattaggtttgttttttatttttacttatgggaattaattagaaggaattcgcaatgaagtggtatcggggataacgctaaatggtgaacgactttaaactgactagcataaataggcctgtacttccaaaccagtgatgccattaagccacagatgatcacaaatagcaaactttattattttatccctcagatgttacgtatcactacacgtaaatcacgactgcttttaacaaattatcttatctgtttatcaacataaaaaaaccccgtaaaaacggggtttcagtttgtaatcaatacgacacagaaataactctgatcacaatagcgccttttttacgatcgtaaagcattaatttttaaatcatgtaatttattcataaatgtccgcatacctacacgatgtgatgtaccgtccatttccagttttacatctcccattatgagcattccttccaccagcccttctgccttctggagttttttccctatgtgagtgtctgagcacccgtatttcttcgccaaccggataaacgttttgccgaaaacatagtagtcaaaaagcagatcatgcatatcgctgttgcggatgttcagttttgccataatgccggatatcaccagtgcatcattatcagtacattgctgacgactcttaacctttacggggataagccctttaaacccggcggcaattgatgaccaggttacagattccgggttatccgcaacccatgccccccagcgttctaatatcatctgaatattgctcatcgtttatctctccgcactccttacagcgcattaaccaaaaacaccgatcccgtatgaccggttcataaacttaaataacagctccaactggctgccgtgctttgcttcccatactgccgggtcgcggtgtaattcgtcgtggtgaacccgacacagcggaatggtgaagctgtcgtgtgtctttgtgccggtaccgccggtgccgtgaccgatgatgtgatgcgggtcgtctgcctgctgaccacatacgcagcacggctgactcttcacccattgcaggtacttcggacactcccagcgctttaacttcgggatccgcataaaactggctggtggctccggctctatatcagtagcaacaaccggttttatctgctcaacgatgtcctgaacaatccggctgtgtgagcgcgtccggtgaacaatggaatgctccgtcatggtgccggttatctcttcttccggtgactgcatcagaatgtaagaacagatgaaggccggaagaagctcactgacacgatgcatcacagaccaggtgaacaaatcggaaggattcaaaagatggccgccgggcagccgcaggtcggtaaagatactgcgtgccacaaatgcccgttggttacgcaacagtatttcatccgcctgctgctggtggatattcccctcccggaagatgttgtcatggtgccagcacgtccggataaaaccgtctttgtagcgtgtcatggtcagttcatggtgatgatacggatctgcttcatcgtcaatctggcaatgatttactgatgaaacgtaatgacgaaatccctgtaaaccaccggcagcttttatcacggcgggattgtccaggaaacgcagtacccgctcatctgtcagcagcggctgtgcatctgccggaacgcggccggacggaatgccatccattgaacggggagccgcactgacaacataacgggcaccgttccggaagttgcaaatctcagcaccgggattaaacatcaggatccgggtatctttctgaacaaagccggttaacagataattcatcaggccaccgccggggtcatcatcagtgccagcagttccgctgatttgctctcaaagaaatgcggctgcgtttccctcggattcgccggggatgtgatatttttgccgtacagaagcccccttgatgtgacagaccagaacagtttttgtgttcccttcgaacccggacgggctttctgttcgacaatccccagttcagcaagacgtttgtatgctctggtcgcagacaatgcggcattgtgatttttcagcagcgtagtcagagaggttgtcggtctgctggagccatctaccgcacccgccggtgcatcaatagcataggagggagccagatccggaagaccagccattttttgcagtttctgatacccgcccagttttgaggaattcgacagattcagcgttttcgccatagactccagcaggatagcgcctgcctgtaccttatcggccagctgtaccgcctgctgtgttccggccaccgcatcgaatgtacggattactttcaggttgaacagcgggcttatccacatggcataggcataaacaacctcacgggcaacatatgtcccctgctccgtaccgccgcgaatggtgtttacagaggcgatgctcatatctgagcatcggtcgatttctgaacacaatgcctgtgttgattccatccgcataaagttagatggcttatggcgctcttcacccccggcggcacggtgtaaatcattcaggcaatagcgaccggccatgtcccggcgcacattaataccgtcaacaataatcagattgctcatcgtttatctctccgctcattaagcgcagccgtatactgcgcctcatatcgccagaccgttttttcttctcagttcccgctgttttgccgtgaaggccgtaaacaaccggttatagacggatacaaattcccgttcggtgagagtggcccggctctcttccggtaccgggtccgtacagcggaccttttttactccccgccgacaggctgccaccagttcctcatattcgcggactttctcctgtgcatccggcaatatccggaaagccatccggtcattcccccgccaccgggtcggcgtgacagcttcaatcttcgctaaaacccttacagctgactggctgatactgcgtgatacgccgtatttctccatgatgtacccggaagtgatttcagttccggccggttcctctgccgcaattcgggtgtaaagcatcatcacgcagcctcccgttcttttgcggcctgctctgtggcctgtttccagtacccgcggaatgctgctcgtccggcaatttcattcatccgcccaatgtaggatttgtgttttgcgaccagctcctgtacgcggttttctggcttccagtcggaggatgagaacatttttctgaagacttcatcgcactcggtggtgtcgatgttctttgagtccgcagagcgtttaaatccggcggccgtattcagccagtatctgaaaccggagttccagcagacatactgcgtacccttgctggcgtggtaatcgctgaacttctgaaactcgtcctgaatgtccagaccggcggctttggcctgctcaatgtgttctggtgtcggagcaaagttttccggcatcacggttttgcttttggcttttccgcgaacaggattaatatttttattatctggatctatgattggatcatgactgattccgggtgcagctcctgcaccactaccggaaccatttgcaccacccggtgcatctgctgcaccagtccgggaaccatttgcaccactcacccccgcaggatttacaccacagggtgcaggagattcaccactcacagcggtagcattcaggcacagatgataaatatttgactggttcagaccgttggccgattttcgtgactcaacacgaaccagccccattttcaccagggcattgatgtggttctgcactgagcgttcagatatttcacactgctcagcaatgtacggcacagacggccatgattccccctggtcgttggcattgtccgccagtttgaccagtaccagttttcgcagcgggttgcctgtttttatctgtaaagcccgtgcagttaaaatcatgctcatggtttcacctcatccggacagcgtgcataccgttcctgaaagattttcagcggttcaaagcacgggtgctcataaccgtcacgcatgaaaatcacccggctgttttcccggtcataccggataacacggactttccgtccccgcttatcggtgtaataccggttcagattgtcagctgtttcttcaggcattctgacctccgctgcggtaataaaactgcgaccagctggcctccaccttttgccggtctaccacttccggttttttccggtagttgtcggctgtgccgccacccggtatgctttccacataacgaagtggttcactgccggtaacaatgcatttgaattgcctttccggtattgaatgagttaatctgctcatgcgtttatctcttcacacaattgatatggcgcgatcgaagccgggagccgtatactcccggcttcaccctttctgagtccgggtaaataaaataatcgtggattcaacctcatctgttctggcctgcatgtctctgtagtgtgcagtccgtattgcatccgcttctcctgtggttatttctccgtcctcaatagccttactgatacacaggtccacagccccgcgcataacggatgccctgacgctcttttcgtataagtcagtacggccgatttcactttttttcgggctgtccaccagcagcattccggactccgccgcaacatattcggcatacagcacagttccggagacttcctgcatcaccatcaggtcatgatgatcaaagaaccggcagccgtttttctcataaaaccggttattgaatgacgtcagagacaaaccaagggaaccggccattgcatcacgtccgccggggaccagactgcacatctctcttacaacttctttcagggattggtttttcattgcctactcactttcagattgagttgtagttaaccgtgcttttccgtgctgctatgctgataaagtgcagggttgtacttaagtcctccatttgtaattcgctcaataattaacgcttgtttttcgggaatagttttcttccagcggcaaactgccggatgactgatattaagagctgcggctgttttttttactccgccgaaaaaatgaagaacatctctcttcaacatttgtacgactcctcagacctttgaatgcaagaaaggtaacaaaaggtacaattacatgcaaacacatttcacaccattgtgatgtaacattggttacatgaaaacggaaatgaacgaacgcatcaaagctcgtcgtacgcaactcaatatgacgcaacaatccctggcaaaaatgctcggggtctcacgcgtatccgttacaaaatgggagacaggtgtcacaaaaccagatggtgaaaaccttcacatgctggctaaatcactggatgtctctcctgaatggttactatttggcggaaatgaaccactttcgactgaactggtatctgcaagaaaaaccattgctgtcaaacaaatccctgttatatctgccgtacaagccggtgactggacatcaacatacgcatcagcaactattgatgatgtacttcgctgggttaacacaaccgcccgggtatctgaaagtgcgtttggccttgatgttaagggtgattcaatgacaaacccaaatggatcaccaacaatccctgaaggctcaacagtcattgttgaaacacaatttggaagtatagaagatctatatggaaaaattgttgttgcaatactcgatggcacatcagatgccacaatcaaaaaactagtctgggatgctccctatacctacctgattccgctgaaccccaatttcaaaccgatagtagtcaatggtaactgtcgaatcattggcagggttattcaggttattcaaaacatctgatttattcctccctcatttgccttatctatgcagtaatgtaactttttttacactaactattgacctcagatgtaacttaaggtactttttgtttcatgtaagaggtaccattttttacatgaggccaatatgaaccaagaaccaatcatcaccaccaacagcatgtcagcagacgaagttgcagcgtggattactgaaaaagcccgggcgcttcaaaaactgcaatcactccgtgctgagcgccaaagagagatacgtgaccacgagcgcactatggcccgcctcgatgaagacatcgccagatgggaagacttctgtgctttaacagtacaaccgcagtaacggctgcatatctgaataactgtgtgaagagtgtcaattagtgtggggagatagacgctatgacaactgaaaatgaaaaaacagggcagcaagtgccaccctatggtgatgagccttttatctactcaggaaatcttgatttagatgcactgatacgctggatggaggatgaggccaataaattaaaagcaatcagacacgcaataactgaatcaagaagaacacttggttatctcatgaaagaaatgtctggtgtcattcagtgtcagactctgataaatagtatgcgccatcacccagattccagtttactttcagattccaatcaattttcgaatgatctgaattcaattttattacatttaaatagtcacgaactccttcacagaagctatcaggggataggtgtttcagaagaagaaaaaccattttctgaagcgaaagagaattagcctgttcaattggataccggtattcagttagtatcgcatgccttaatactgaatcacccgtcaatttaataaatggtgtcttgcttaaatttaatttttctttgtagtcagcaatgtaaatttcaagaaccaatagcatgtaggaatgcaacttggcgctatctttatcgccgctacgggaataattatcattatatatggcgttatagaatggataaacaatgcgttgtatctgttcaaacagagtagcaagttgaccggttttcatgctttaccctattggttgtgtgagaacaccaagataccaccgccgcccgaggtggttaaacaaccgggcacgaatattgtgaagagagacgaccccataacaataacgatgcagcatcattagcggccgtgcataacacggtacagtccaccactcggccgccactttttacaaacataagtccaccggtgtgaatcgtcctgccggatagataccctgcctgaccgccggtggacttatctttgtgtgaagagacaacgaaaggaaaaacgcgatgagcgagaataaccgtatgaccaatgccccggactttctctccgggttagatgccggtgtgtttggaaaccgatattcaaaacctataccggtaaattcaaagcttaattattttatgccgctttaaccgacggtattttactacccgaaccagagaaaaaatcagtttaataaaatatataatctttattttaaagaggatatacatcatgtcagaacaggataagccaagtgttaagattaatattacagtgactttaaatgaagcaccctgtattaatgttgaagtaagtaaggaattcaacatacctgaaaatgcaccttatatagcctcttttttagaaaaaatcggtgaacatattgccagcgaagggacgactacagaggctataaaaaaagcaataaaagacaccattaaaaaaagaaatattcactgaagctacgctcttcttatatctgaataatctcaatcgtatacggtgatgtgcagagtgtgactatgaaaatgttaactttggatgaatgggcagaagaccggtacaggagccgcccgccgaaactgggaacattacagcggtacgcccgatatggtctatttttcccaccggcacagaaagaaggtggtatttggcgcgtgagagaagatgccgaacttgtcggtaatttaatctcaccggtgatcagcaaaagtgataatcccaggctgcaaaggattttaactgatggctgccagaccccgtaaaaataatatcaatatccccaatctctacccgtttttcagcaggaaaaccagcaaggtgtactggcgctacagacatcctgtcaccggaaaattccattatctcggtgacaatgaggaagaggccaaaataatcgcggttgaggctaatctgcggttggctgaacagcgaagccgtcaggtaatggcgatcagtgatcggatggcgaaaataaaaggcaaagaaatcactgttaatacctggctggatcggtaccagaaaatccaggcagagcgtctggcagacggtgaaataaaacagaatacctttaagcagaaacagaaacctatagctctgatgcgtcatgcgttgtcacaaaaaccattaccggcagtcgatgcccgtgatattgccgatattctggatcagtataaggccagtggtcagcaccggatggctcaggttgtccgttcggtattgattgatgtattcaaagaggcacagcatgccggtgaagttccgcccggatataacccagccctcgcaacaaagcaacctcggcgaaaggtcacccggcagcgacttagtctggaagaatggcagaaaatttatgatatcgcctgtaaggaccataaatatctcgggaatgccatgttgctggctgttgttacaggacagcgcctcggagatatttcagaaatgaagttccgtgatatatgggatgatcatctgcatgtcatccagcaaaaaaccggaacgcggcttgctatccccctttccctccattgtgatgcactcaatatcagcctgcgggatgtgattgccggatgccgtgatctgtatgtcagcaaatatttagggaaggtgcgatttaatcagtcatgacgatccagagcctggatatcctccttacgcggcaaagtaagcaccccagtttggacaatatttaatctcccccatcaactcagggtaagcaaaatgtcactgctccactgatattacaatgattttcacgacatccccgccagttgtcccgcccgcaccaaattgcacattgcaaacagcattgaaagccggttgtggttcttcatcagtccccgtaatcgtgttttgctgaaaccaaactggcacttcagtatccggaaaggatgctcaacctttgccctaatacctgctttcacatattcatcatgcagcgcctgcttattcagccggggatgctgtctgagcttttttacggcatgaggacctttggcaataaaccactctttaacccgatgtgtcagagagtcccgtttttctgccccgcgatatccggcatcggcgaagacaattgctaccggctccgtaatcaggctatccgccgcattcaggtcatgcacatttgccgccgtggtcactactttttccgtcaagcctgtggccgcatcaacagcaatatgagctttcataccaaagtaccactgatttcccttgcgggtctgatgcatttcaggatcccgttgaccggctttattttttacggaacagggagcggaaataatggtcgcatcgataatgatgccctgacgtaacatcagtccggcctgcttcagtttctggttaatcagtgccagtatctgttctcctgcatgatgtttctccagaaaatggcggaaattcatgatggttgtgcgatctggcaccgtgtcacagatccccgcaaattgacggaacggcaggacatcatgcagggcgtcttcagccgctccgtcactgaggtcaaaccagagttgcaggcagtggatacggagcataagcaccagggggaaaggccgtcggccgcgacgggatgacggatagacgtgaagcagcttatcagcaatatcctgccacggcaccagaacattcatacggtcaagaaaacgggatttacgggaggaatagctggaaatggcaggcattgtaaacagctcatgataaagaaagctttatgttctcacatatgacgattaaatcgcaccttccttagtccactacacacgaaacacatcacagtcacagcccggcggacaggtaaccgcaaatactctgaccaccaactttaaaaaagccagagataaaaccaatatcgattggggagaaggaacaccggcaacatttcacgaaatgcggtcattgtcggaacgtttataccgggaacagggaattaataccaaaaacctacttggccataaaaaccagcaacaaaccgataaatatcatgatgatcgcggcaaaggttggataagggttttaatataatattttattaatcaataaataagtctatattatcttatcagatatttttcatttagggattatttttctccatgttactggaaagtaattataatcccttttcagactttatattcaattaaataaaatcagttagataatcgttttctctctcgccaagttatgaataagtcaactatacttttgtgatcaattttttttgaacttaaagcccagtaatgattagcagataacaatacattgttaactctcttacaatactcataatagtattctctaagtgcgaaagttattgtcaccttccctttctcagttaaaaatattctttcttttgtaactttttgagctatgcaaccatgagaaatcaacgtttttattacatcattaaattctgatgttcgaattttgtatacatgaccttcttctgcaatatctgctaaaaaagctcgtttcatacaacaatcattaacggcaccaaaaattatattttcatctgtatgaaattgagcacatgctaagatatctacagcaagagggaatatagttaatctatacgaatctgaatgtaaatcaataagtttttgtgacgagcaaagagattttattgctgatgtctgtatataattagctataaccacctcgtcagttgagctattaaatttaccaggtaaattatcttctaatattgttttgcaaagtcctagtgattctctcaaatttttttcacatatagaagatattacttcattacatagcattacattaaatggatttttaaatcccacaggattcccacacgtttgttttattctataatcaattagatcataaatagggatgcttggaaattcataaggatcaggaaaaaactcttcaattttcttttttgttgcaccattataattttccagtgtaactctacggatacttagccatttctttactgaattaatttctatactacgcaataagtgttcaaccgcatgatttacctgctctcctgagaggaggtcaacatcatctatcgcaagtatcaacattttgctaaatatatctttatttctcttataatagtcggaaagtttattgagtaaactctttggattttctgaactttcctgcatttccgaaaaaatattactatgtgaacattttccataaaaatatttccaggcgtcaattatatgctgacttgcctcatcgataaaaaattcattattaacatcataggttctattaatatgtattatgtacatgacataattattaagttcgctttccgcatcagcattttcacacatatatttaaaggcatataaaaatgaagttttacctgcgccaggttcaccagcaatcctgatattttgagaatttagcccggatgataatgtagttattaggttaatatatagtgtatctatatcctcattgcaataataatttttctggaaatactcatagtcattggttgagtgacaattaccaaagttaggtagtttagaccagttcaagactttaaaccaatctcttactgaaggtgatcttgtattaaacattactgacaactccgagaattgtatagatattatataaggttgggaaaaatataaaaattgaaccgatagccatagtcactgttaaaattactcttagccaaaaatttacttgtgaaaaatatgcatattttataaaagacaaaatccttattgatttttcaaaattacacctattctttgtatcctcaacagaaacaaactcaaatttatcaagagatatatcatcatggcaagttggtaatttatttttaacatcatccaataccgaaaactctatacttaaagtaacatttttttctatttttataagatattcactataagtatgtgaatcggaaaatttttttattattgcaggagtagatatttgacaagctacatagcctaagagaataatgattgcaccaatcaaactaataataaatgattttggatatatccctgtatttctcactaagatcgaaactggtgtgcttaacgcaataaatataaggcatttacctaataaaccattatacaagtcgtataaaaccttccaattcatttcagggtaccctcttttgattttttaaattttagttactagcttaaaactgatagttaattttgcctcatactacaataatatactgtttttatatctatttttgttatttaggatcacataatctagacgcttcacgctatcattttggtactgcacgccaatactttttagccggcgaaattcgaacggtccttcattattctacccagagcacagaataatgcttatcgggaaactacgtacatctctcaccagatgaattttggtgctaaaaccaccacaatatcgggatgtcattttgagtgtaagcaacacatttcagtacctagatattgtagcctttcaactactgtagcagagcattcaaaagagttatttgtattaagtaataaaagtaaccttattcaaggtaggattaagaataacagatatagaccagaagttaaatcgattataacctatttaccactggagatattacttaaataaatcgagatataggatatgagtataagtatcacattaaagtgaatggttctcttttagagatattcagatatgtgaattataaacccaaatcgaattccattcatacctggacttaaattccgtgaatacttcaatattgtataagaacggaacgccacacaaaatgtgcaccttggattttttcttacttccgatgaaataatcttgtcctgattctacttcaaaccagcattttgtcctctctgcatcatttcttttatatatgactgacttccatctttgatgagagttgaaagttcactcaacccaccaactattttttgagaaacaataaaattaatatcccgctccgctaatacgggtattaaatattcatatacctcagagtcatcacaataatccatcgcgcacatcccccactcagaattgataaagggatctataacatcgtagataaattgtgacgtttggatggatacatctctattaggcgccgcaaaatgttggatagagtttcttagcttaccaaaggcattgtacaattctaaattgtttatcttgacacctgtcgatgcccaaactttctcaggcaactcggaatatgtaatcgtttgccctttttctaataaactctcgaaatccagcagtcctgtcgttttattcacgcaattagctgttgatttaggtaatgaatcaaaaatcaaaaggggatgttcttgtgcaaggcgagccttaaggaaaatttcgcaagcatgagcagcctgtaaaacgcccaattgagaccacattgtgtttgcatagtcaacaaaatgagctaggtagtttgcatgagaaagtgagccagcacccaaaacaatcatgtgctcataaacatgttttaaattggcatccatgacaataatcctcaaatgaatacaaatataatatacataactattttctacagtactacttacgcaaaaatataactacataaaaatcatcgcgacaccgcataatgcaacgctaaagtacagaatctctacaatttatgctcttcacttaaagcgcggcatcctccttacttaaaaacctcaaatatctgaacttgccccacaactcatacaaatttcataccgttttgctaaatcattttgcaaactttttgataaccgtttcagactgaacaataaaaaacgggaactaatcagttcccgttaactatttcactgtaaactcaattacatgtgtttgatgattgcgtcaccaaactctgagcatttcagcagtttagcgccttccatcagacgttcgaaatcgtaagtgacggtcttggcagcgattgccccttccattcctttaacgattaagtcagcagcttcaaaccagcccatgtggcgcagcatcatctcggctgagaggatttctgagcccgggttgactttgtcctgacctgcgtattttggtgcggtgccgtgggtggcttcgaacagtgcgcattcatcaccgatgttcgcgcccggtgcgataccgataccgccgacctgtgccgcgagggcgtcagaaatatagtcgccgttgaggttcatacaggcgataacgtcatattctgccggacgcagcaggatttgttgcaggaacgcatccgcgatcacgtctttgataatgatctgtttgccggttttcgggtttttcaggcttaaccacgggccgccgtccagtaactcgccgccgaactcttctcgtgccagttcatatccccagtctttgaaggcaccttcggtgaacttcataatgttgcctttatgaaccagggtgacggaatcacggtcgttatcaatggcgtagttaatcgctgcgcggaccagacgttttgtcccttcttcagagcacggcttgataccgataccgcaatcctgcgggaagcggattttggttacgcccatttcgtcctgcaggaacttaatcactttgtctgcttccgcagaaccggctttccactcaataccggcgtagatgtcttccgcgttttcacggaaaatcaccatatcagtaagttcaggctgttttaccgggcttggcgtaccggcgtagtaacgcaccgggcgcagacaaacatacagatccagaatctgacgcagtgccacgttcagggagcggataccgccgccgaccggggtggtcagagggcctttgatagccacgcggtagtcacggataaaatcgagggtttcatccggcagccagacatcactgccatacagttttgtggatttctcaccggtgtagatttccatccaggagatttcacgcttaccgccataggctttttttacagcggcatcaacaactttaatcattacaggcgttacatcagccccgattccgtccccttcaataaacgggataaccggattgtccggaacgattaatttgccttgtgcgtcaatggtgattttagcgcctttcgccggaacaactactttgctttccatcaacctctccttaatgttatgtaagcgcaatgctttgttaattttttgtaatggccctgtcaatactacttgaataattgcatcacgcaaatcctaactgttttaagctataatgtaagtctcattttttataaaaaagatatcatggctgtcaaaactccccgaatccgtacgaccgaaaaaaaacattcacacccggcggcacagcgccatctgaataagcctgtccgtcagcgcggtccgcgtaaaatggttttgtttaacaagccgtttgatgtactgccgcaatttaccggtgaacccgggcagaatacgctgaaggattatattccgatcaaagatatttatgccgccggtcgtctggatcgcgacagcgaaggtttattaatcctgacgaatgacggcgtgttgcaggctcggctgacacagcctgatcataaagcagagaaagtgtattacgctcaggtggaagggataccggacgaggatgcgctgaatcagttacgtaacggtatcattctgaatgatggcccgacccgccctgccggtgctgagctggtggatgagccggagtggctgtggccgcgtaatccgcctatccgcgagcggaaatcggtaccggtcagttggctgaaactgacactgcgggaaggccgtaaccgccaggtacgccggatgaccgcccataccggccacccgaccctgcgtctgatccgcgtgcggattggtgattttgcccttgatacccttgcccccggcgaatggagagaagtgaatgatattcagacctcatgtgacagtggcctgcctggtcagcgccggtgaaaaatttctggtggtggaagaaaccgttaacggcaaagccacctggaatcagcccgccgggcatctggaagccggggaaaccctgcttgccgccgcagagcgcgagctgtatgaagaaaccgggatccgtgctgctcccgatgccctgctgaaaattcatcagtgggttgcaccggacggtacaccgtttatccgttttctgttccgtgtgctgctggacagtgagtgtgagacgcacccgcaggacaacgatatcgaccgctgccactgggtcagtgcggatgagattattcacagtccgatcctgcgctccccgctggtaaaagaaagtatgtttgcctggtttgccgccgaaccgctgccactctcgctgctgggaacgttcggggatgcgttcggggaaccggtcgcgccgtaatgcattgcggggaacagactgcggaaaattctttgcgaaaaaagtgccgatcccgcacctgaatgatgcgccgctgtgcgtatcatggtaaagtacggcgcttgtttttttccccggttcttcttcgcgtcactgtttgcggagcagaccgaatcgccacgagatcagccatgtcagataacagccagaaaaaagtcatcgtcggaatgtccggcggtgtggattcctccgtctcagcctatttactgcaacagcagggttatcaggtgaccgggctgtttatgaagaactgggaagaggacgatgataccgaatactgctccgccgccgcagatcttgcggatgcacaggccgtctgcgataaactcggcattgaactgctgaccatcaacttcgcggcggaatactgggataatgtgttcgagcatttcctggaagaatataaagcgggacgcacgccgaacccggatattctgtgcaacaaagagatcaaattcaaagcgttcctggaatatgccgcagaagatctcggggcggattatatcgccaccggacattatgtgcgccgccgcgatatcaacggtaccacgcaattactgcgcggcctggacagcaataaagatcagagctatttcctgtatacactgagtcacgaccaggtggcacaaagcctgttccctgtcggggaactggaaaaaccggaagtccgccggattgcggagcaattagggcttatcaccgcgaagaaaaaagattccaccgggatctgctttatcggtgagcgcaaattccgtgattttctcgcccgttatctgcccgccaaaccgggtccgattatgacggttgatggtcaggaaatcggtcagcatgacgggctgatgtaccataccctcggccagcgcaaagggctgaaaatcggcggaacccgtgaaggttccgacgagccgtggtatgttgtcgataaagatgttgaaaacaatattctgattgtcgcacagggccatgaacacccgcgtctgatgtctgcagggcttatcgcgcagcagctggactgggtatcgcgggagccgctgactcagccgatgcgttgtgtggtgaaaacccgttaccgtcaggaagatattccctgtactgtcaccccgctcggtgatgacaaaatcagtgtccggtttgataacccggttgctgcggtcacgccgggtcagtccgctgtcttttatcaggatgaagtctgcctgggcggcggagtcattgaagcgcgtattacggagtgattatggctaaaaattacgaagacataaccctcgccctggccgggatctgccaggccgcgcgcctggtgcagcaactggcgcatgaaggtcagacagataatgatgcggttgatgtgatgatcaacagcatcatcaataataatccgtcttctgtcctgaatgtctacggcgacaatgtgcagaacctgcataccggcctgtccgcgttcgccgggatgttcaatatgaccggctctcaggggctgaatgccgagctgacccgctatatgctgggtgtgatgctgctggagcgccgcctgaacaaagcgccgggcgcgatggatgaactcggccgccgtattgataatcttgaacaccagcgcgaccattttgggctgtcacaggaagctatgcttaataccatcgctggtatctatgtggacaacatcagcagcctcggcccgcgcatccaggtaaccggctcgccggagatcctgcgtaacaccctgattcaggctaaagtccgctcgctgttactgagcgggatccgcagcgccgtgctctggcgccaggtcggcggcaaccgtttacagttgctgttttcccgttcacgcctggtggacactgccaaatatcttctcgctcaacactaaaattaccgggagttgcaaccaatggaattatcctcacttaccgccgtttcccctgtcgatggccgttatggtgacaaaacacgcgcactgcgcgatattttcagtgaatacggtttactgaaattccgtgtacaggtcgaagtgcgttggttacaaaaactggcggcgtgtgcagacatccccgaagttccggcttttgatgatgacgcaatcgcttacctggatgcaattgtcgcgaatttcagcgaaaaagacgcaatgcggatcaaagagattgagcgcaccactaaccacgatgtaaaagcggtggaatatttcctcaaagaaaaagccgaagccgtgcctgccctgcacgctgtgtctgaatttatccatttcgcctgcacatccgaagatatcaataacctctctcacgccctgatgctcagcaccgcccgtgaaaccgtgctgctgccggcatggcgtcagatgatcgatactgtccgtgccatggcggcggattaccgcgacctgccgctgctctcccgtacccacgggcagcctgcaaccccgagcaccgtcggtaaagagtttgccaacgtcgcttaccggatggagcgccagtaccgccagttacagcagaccgaaatcctcggcaaaatcaacggtgcggtcggtaactataacgcacacttatctgcctatccggatattgactggcataaattcagcggtgactttgtgacctcgctgggtattcagtggaacccgtacaccacacaaattgagccgcacgattatatcgctgagttttttgactgcgtggcgcgttttaacaccattctgatcgatttcgaccgtgatatctggggttacattgccctcaatcactttaaacagaagacgatcgccggtgaaatcggttcgtccaccatgccgcacaaagtcaacccgattgattttgaaaactcagaaggtaacctgggtctggctaacgcggtactcggccatctggcaaccaaactgccggtgtcccgctggcagcgcgacctgacggactccactgtgctgcgtaacctgggtgtggggatcggttactcgctgatcgcttatcagtccacgcaaaaaggcctgaacaagctggaagtgaacgaaaaacatctgcgtgatgaactggatcagaactgggaagtactggcagagccgattcagaccgtgatgcgccgctacggtatcgaaaaaccgtatgaaaaactcaaagagctgacccgcggcaagcgtgttgatgctcaggcgatgcaggtctttatcgacggactggagctgcctgacgcagaaaaagcccggctgaaaaccctgaccccgcaaaactatctcggggacgctatccgtctggcagatgagttgtaattattaactcactgataattaatcacacagaggcagaggatatctgcctctttttttatgattaaacgcatatcgcgcgtattatttggcgtacaagttccctatccttcatataaactgttacaattcacatcgtttcctgttgggatgtctgtctttgtaaggaattatgtatgcgcgtgctcatcgtggaagataacaatttactccgccatcatctgacggttcagatccgcgagctcggccatcaggttgatgcggcggaagattcaaaagaagcagattattttcttcaggaaagtcagccggatatcgcggtggttgacctcggtctgcccggcgaggacggtatggtgatgattgcccgctggcgtcagcagcaggtcaaaatcccgattatggtactgaccgcccgtgaaagctggcaggaaaaagtcgccgcgctgaatgccggggcggatgattatgttaccaaacctttccagctggaagagattgttgcccgtatgcaggcactgatgcgccgtaacagcggcctcgcctcccagacactggaactgggcatttttgttatcgatctttcccgcaaagaattcctcgttgacggtaacgccgtcaaactaaccgcatttgaatacaccattattgaaaccctgatgcggaataatggtaaagtcgtcagtaaagattccctgatgcgccagctctatccggatgccgaactgcgtgaaagccacaccattgatgtgctgatgggccgtctgcgcaagaaaatccagacatttaccgatattgatgccatcgtcactgtccgcggacagggctaccgcttcgacgcagggaagtaacagacgccacttaagccactgaggtattgcgcatgaccaggcggacaacgcgccctttctctctgcggacccggtttttactggcaacgtttgccgtgatcctcgccatgacgctctcttacggcgccgtggcgctggtcggttacctggtcagctttgataaaaccacctacaccatgctgcgcagccagagcaatctgttttacagcctgtcgcagtgggatgacggaaaactcaatatccgttttccgccgaatttctccctgaatgccccgtctgtggtgctgatttatgatgacaatcagaatctgctctggcggcagtatcatattgacgcgctggagagagccattccggccaaatggctgaccaaagaggggttgtatgatctgaatacctcgctggaagccaccaaatccctgctggtcaatactccgctctttgccacggaagatatccggattaatgacctcgatgatgatcacgacggacggatgatccactccgtgtctgtcagccgttacggcaaaaccgataccctgccgccgctgacgattgtggtggtggataccatcccgcaaaatctgcagaagaccttccgtgtctgggaatggttcggttacgtggtgctcgctaacctgtttctgctcacaccgctgatctggctggcggcacactggagcctgcggccgattaatgctctcagcgggcagatcagcgcccttgaaaaaggcgagcgggaagatctggatgaaacgccgcccagcgaactgcgcggtttggtgcgtaacctgaacctgctgctgcacagtgagcgggagcgctatacccgctatcagcgcacgctttctgatctgacccacagcctgaaaaccccgctggcggtgctgcagagtaccctgcgctcactgcgcggtggtaaagatatgactattgaaaccgccgagccggtcatgcttgaacagatcggacggatttcccagcaggtcggctattatctgcaccgcgccagtatcggcggtgacaataccgtgctgatgcgggacatttcctccgttccggcgctgattgacagtctcgccagtgcgctgtcaaaagtgtatcagcgcaagggcgtggatattaccgtcgatattccgccggatatcacctggctgggacagcagaatgactttatggaagtcatgggcaacattatggaaaatgcctgcaaatactgtctggagtttgtcgaggtgacggcgcagtggcagcatgatgcggttattctgattgtcgatgatgatggtccgggtgtgccggaggagaaacgggaactgattttcagccgcggtcagcgggttgataccctgcggccgggtcagggactggggctggcaattgtcaccgatattctggagcagtatgacggcggcgcagttgtcactgaaagcccgctgggcggtgcccgtattactgtgacattccggcgtcaaactgttcacgacgaagacacagactgagagtcagtctgttgttgccggcaagttataaatatatgcatgaatataatatgtctttttccgttatactcccttcatctgcctgatcacggcgtttattgaggacgaacacatggattatgaactgaatatagactggcagacctttatggaaagccactggcaaaaacgtccgttactgatcaaaggcggtttccgcaatttccgcgacaccatttccccggatgaactggcggggctggcaatggaagatgaaatcgacagccgtatcgtcacccgtttcagcggaaaatgggatgtgcgccacgggccgtttcaggagtttgacgggctgggcgagaaagactggtctatcctggttcaggccgttgatcactggcattttccgtctgccgcactgatgaagccgttccgctgcctgtctgactggcggatggatgacctgatgatttcctattctgttccgggtggcggtgtgggtccgcatctggatcagtatgatgtgtttattattcagggccagggacgccgccgctggcgtgtcggggaaaaaatcccgatgaaacagcacgcgccgcatccggatctgttacaggtggatccgtttgatgccattattgatgatgaaatggtgccgggcgatatcctctatattccgccgggattcccgcacgaaggctatgccattgaggaatcactgaactattctgtcggtttccgcgctccgaatgcccgcgaactgttcagcggctttgccgactatgtgattgccaatgagctcggcagttaccgctacagcgacccggatctggcgttccgtgataatccggcgctgattcagcagggcgaactgaccaagctgcatggtatgatgcaggatctgctcgaccagccggatgtgttccgcaagtggttcggtgaatttatttcccagtcccgccatgagctggatctggcaccgccggagccggcatacagcccggatgaaattcaggaactgctgtcacagggggaatctctgttccgcctcaatggactgcgggtactgcgtgtcggtgatacctgtttcgttaacggcgaagccctgaaaaccccgcatattgaagcagcggatgtgctctgccagtatgatgaagtcactgccgaaatgctgggagttgccttcagcgatccggaatttgtgaccctgctgacagtgctgattaataacggttactggtattttgatgattaatccgcaataaaattgtattcatcgttcagataaaagcgccgcaccattatgcggcgtttttttactggtaacgaatggtgtaattcagaattgtttccgccgtgcccggctcaatagtatccctcgtctgtataaaggcggcctgtaaccgcaatacggcccgctgagtggtgatttcatcaaataaaagtggctctccgaaagtgaccggctgccccttatttgtcagccggactcccacaccggatgcactgccgtttctccgctgtaacttcagtgttccgggactgtttctggcagtaaatacattgcctgttaaccggatatccgccgttgtcacatggctgcactgcagtgcaatagtcaggttacggatgcttcccggggcaacagaccctttgccgctgaaatcagtccgcgatacgacacctaaatccacatctgtttctgtttgtggatcaagatcacaggaatgttgccggacagtaaatccgtccagatagattttggtttccggcatactatacaatcctgcagcccagtacccgcccacacgcatagcgatttcacccagatagcctcccggatggtgaacagctatttcaggttccagtttatagagtgtcaccgctgcccgtacccgatatggctgagacggatccatgccgctgctgatcgtacacagtcgtttattggccgtgttgttgtccggtgaatcacgaccgtccacatagcgcgacgatttcatgcattccggatgctccgccaccgcccccaggctgtagccgataccaccggagagttcatagatagtgtgtcccgacgcattttgtgttctgttacccggcattccgccaaccagcacaaattcaatctctctgccgctgtcgatccggcactgagagacatcaatactatccgaaaatattgtctccccgataataccgccaaccggtacattatacgcagccatgatatagccggctggtatgcggagagtcgtttccggtgtgataagtgcacaggtttccccggctggagcggccggaatatatccggctgtcagccacaggaaaaaaactgcccggcatagtgctctgatctgagtaaacattgcttctcctttaccggcatatcagagggagagttatcagtccctgctgatcttccgggacagtaaaatccgccccgcactgctcatgcattcctttcccccagacagcctgtaaatgcccctgagccggtaacccgctgagatacacttccccgtcctcaccggtaataccgctgacgctgctgtcatctgcttttttcaccttcacccgtgcggcgaacggtaccgggccttgtgcagtccgcagtgcataaatcacgcgataaccggtattcactgcaaaacgaaccggcaccagcgctccttttgacgggatcacctgtacgaccggatcatccgcatccgcattatccggcagggtttcggggtcgatacggataacattctgatgataatgactcagttgcggaataacactgaaccccgcactgtcagtctgcgccgctgcccttgaggccacacggatccccccggtaccgccggtatctgccagcccgttggtttcacccagcggacgtgacaatgtgataccgtcaccgtgaataatcagcccgccctgtatatccccgttcagggtattgtgtccctgactgtgattaatacgtccccggatatcggccaggtcgtgacgccagcgcagctccgccccgcggtaatgtgcagccccctgctgctgataactgtgtgtaactgaatacccgagacgttgttcatctccgagcaaaccattcacggatgtttgcagagaagcctttcctgcccgctggtggtaatgaaaatgactgcgggcttgttgtccggcaaaatccagcggcaccgacaacgcaacagacacccgtttatctgccttccgaaaatgcccgcctgtacggtattgtgcattcactccgtaatgtacccggccgatgtgaccggaatagccggcatccctgttaatcatcgcccggtatccgcgcccgtcatggcctgtgcggttatagtgatagcctgccgacagcgtaccgttatcccccggcagcggttgcagcaacctgacctgccattgcctagattgttgctcatgtgcagcccctgtattcaccaatgttccggccagcggaaaaaatttctgataattcagccggtaacgcggatgctgcgttgctgttgtatgccgcatcagaatatcagcagacaccccgcctgccgcgcccatattgacaccggcccccacaccgctgctcagggcatgctgtgccgcataactaccaccgtacagtgtcaggactgaattaatgccgtatgctgccgtacttttcacaaacaggtctttgttattatttctgtttcctctgtattttcctgtatccagcgtgtagctgagccggccctcccgctgcataaccggaactgaggttccgtgctgtgtaaaacgctgtacagtgccgtccgcctcctcaatggtgacatccagttcagttccctgaaaagacgtattcagatcatcaataacaaattcaccggcaggtaatgtttcacggcggatagtcattccctgctgcctgatagtcagttctgcactctgaccggttattccgcggataaccggtgcataaccctgctgattcagcggatacatatcactttgtgaagccagccggatccctctgaacgcacggctgtcaaacagcacatccccgctgaacaattcccccagctgtaactcgctgcgccgggaagcaatggcacggtacatccacaaccgctctgactgccatgtcagtttaccctcacggtgttccgccctgctgtgatgccgcaaccgccagtcccccgcattaacaccactttgcagcaaaagagtatgtccggtacgctgactgaagctgttactgtcccgcgaaaagcgataatcataattgagcataaatgcagtaatacccggttcccataacgaagcatctgcggcccgctgtgcttctgtcagaaaaaaacgttgcgggatagtaatatccagcgactgccgcgcggagtcaaaactcagcgagaccccgctgaccagcgcagtaatatccgcaaccggcgctgtattttctgtttctgcaaatgccggcgatgcatccggccgtaatccccatatcagccattgcctgcggttcacccatggcagcaatcttttttgctgcggatgataacgaaactccagccactgaccactgactgcctgctgattgacagttacagccacgaagtaacggccttcttcctgaaattgccgttcccgcaaatactgaaactgtgcaggatccatcaccgaatcatctccgtccagaccaagcgccgccggattaaaataaggtgcagcaaaaacggttaccggaggaaaaacgatcaccactgccagaagaaaaaaataaggtgttttcaattgcataataatattatttatcaaaaacaacaggtttagaaataatcccgccaaaatcggagatgtagcttatggttatttcgtcattactatgaatagttgttaccggtacagttaatgattcgaagggaactatcatctccgaaacagtatattccttattattaaccaaaatatttctgacggtgatatgaaaaggtgagtcattaatgatttttattctgtttccttttcgttcatacctcagtttattataatcaggctcagttaatcctgcagggcgatagaataatttaaactttgaattaataacaatctgaagtttattttctctgttttcatctgtttccggaatgccttttatattcagccagagtaatgactctctgtcatccggaaattctgtttttttcagcatgacacgcaaaattcctttttttcctgcatccagctgaaaaataaccggcgtgagaataaagtccttacttttcgtcatgccatcttctttttcaacccagctctgaattaaataggctgattttttatccgtattatcaacaggaattgtgatcatttttttatcctgcggataaataaaccgggtgccgccgacaaccacggcagcaatcgcctgactcattgtcagaaaagtaataataagaaaagtaaaaccgattttcatgatgctgtttatccggggcggcaacacctgttgccgccggtattaaatgttactcataagaaacagtgtaattcaccgttgcattaccttcacccggtgttgccaggccggtagcctgatacgctgcggtataattcagagtataatcacgggaatcggcctttagcagaatatcacgatagccacctgccggcgttacctgctgcccttcagcagtcgcaatgctgatccctacttttccggcacttttttcattggcatccaatgcatacagcgttgcattgtctgcatgtgccgtgccctccattttgattttcagcgatgtcattgctaatgaacagttaatcagagaaatatcaaaggctttttcttccgttctgtcatcatttttcttcagtttagcgactgaatgctcgcccagataaacatctttatcttttagtgtaatatcacagcttgagtcagtgattttccctgtaaatctgatattccctgttatttctttgggatcgacgtcgacttccggagcgatttcattaacatcaccatccgcagagaatgcattaaaggaaaataaaagtaaggatgaaataattaactttcttttaaataaagacataaaaattaccttttaaatattcaacaaatatatgtttcttatgacatgtattatctgaacagatataatcatacactaaatattgacaagcggatgactataccagcaggagataaacaaacacaaaacaaagattaatcagtgagtgataaaaaatcacatcaacataataatcttactgtttatttaagtcagtttatttaataaaaaagccatcttatgcaagatggcctttataatatttaattgatatgtgaattatttatttcttcatatccagtgcagttaattctgcaatccgcataatcacggaaactgcctgttccatgccttccagtgagataaactcgtgtttactgtggaagttataaccaccggtaaacagattcgggcacggcagaccacggtaagagagttgcgcaccgtcagtaccaccacgaataggtttgatatccggttcaatatcgcagtcaatcattgcctgtttggccagttcaatcacatgcgggtgtttcaccacatggtcgcgcatattgtaatagctgtcatcaatcgtcagctcgatatagcagtccggatgcagacctttaccgactttctcggcaatcgcaatcatattgcttttgcgtttttcaaaattgttacggtcaaaatcacggatgatatagttcatttccgcgcgttcaaccgtgcctttgatgctttgcagatgatagaaaccttcatacccttcggtattttccggcgtttcttccggcggtaattcgctgtggatgcgggttgccagtgacagcgcgttcaccatcacacctttggcactgcccggatgcacgttattgccctcaatacggatggcaactgccgccgcattgaagttttcatattccagctcaccgacaccaccgccatcaacggtataagcccactgcgcaccgaattttttcagatccacatactgcgcgccacggccgatttcttcatccggcgtgaaggcaatgcggatatcaccgtgcggaatatcactgtttttcagacgtaccatggcagtgatgatttctgcgataccggctttgtcatccgcacccagcagggttttaccgtcggtcataatcagggttttacccagcatggtgtgcagcaccgggaacattaccggcgacagcacttcatcgccgatgccgagtgcgatatcaccaccacggtaattttccagaacctgaggattcacattacgcccggagaaatccggtgaggtatcaaggtgagaaataaaaccgataaccggtaccggccagtcaacattcgccggtaacgttgccatcacgcagccgttatcatccagcgagacatctgataaccccagcgttttcagctctttttccagagcacgcgccagccttaactgaccgtcgctgcttggtgtcagcttggctgacggcttcgactgcgtgtcaaaagagacataaccgaaaaagcgctctaataacttatccatgtgttcccccaataacattgatttcttattatcggggaaacataaattgagttattgcgtcaaatcagatttagtgttgttaatctgcgccagcagctgacggacatactccggcaccacctgcccggcaggaccgtagtgacactcctcaaactcactctgcaccttactcggttccagattgagttccactgtatgtgccccgcacagccgtgcctcatggacaaacccggccgccggatagacatgcccggaggtaccgatggcgataaagatatccgcatcattcagtgcctgatagatttcatccatgccgaacggcatttcaccgaaccagacaatatgcggccgcagcggtgacgggaactgacaacagtggcagcgctcatccgctgacaggtcaccggtgcacgactgaacctgtccggacatcgcacagcgaattttcagcaactcgccgtgcatatgaataatccgctgactacctgcccgctcatgcaggttatcaatattctgggtgaccagcaggaagttatcccccagcacctgttccagctccgccagggcgagatgtgccgggttcggctgcacgtcaggagactgtaactggcggcggcggtcattgtaaaactgctgcaccagacgcggattgcgggcatagccttccggcgtcgccacatcttcgatgttgtgctcttcccacagcccgtcttccgaacgaaatgtccggatcccggactcggcggagatacccgcgccggtcagcacaacaattttaggtttaaactgatccatttttccggccatccatttatcgcgataaaaaaagcgtaagtgaaaacgctggcgcaggatccgccgctgtttgcgtaactttcttaatcggtgcgttctgcgcataatccggcctttgttcatcactgtctccgttcagggtaatgcatccgcacttcggattcaaaaatcattacaattcctgcgggctttactgcccgctcagaatacgtgccggttcaaggcggcaggcgcgtctcgccggataccagcttgccagcaggctcagcacaatggtggttaagaccacatacagcagatcggtcagccgcagctccgacggcagaaaatcaataaaatagacatcgccggacaacagtttgtgcccgataagaaattcaataccgcggataagcggtgtcagattcagcgccgccagtgtgccgagaaccgccccgctgatacagccgaccatgccggtcagcagtccgtaccagaggaaaatggcgcggatcaggctgtctttcgcaccaagggtgcgcagaatggcgatatccccgcttttgtctttcacggcaataatcagggtggaaacgatattgaagcatgccacaccaatcaccagaatcatggcaagatacataatactgcgcactaactgaatgtcgctgtacatgtaaccgtattcgttgatccagctcttatagaagacatgttcacggctggcttccgccgcccgcagtaccacgtcattggcattgaaaacattatccacacggatttcaatcccggtgacgccctcaccgtaatccagatactgctgtgcatcttccagcggcagcagcgccagcctgtgatccagcatgccgcttaagcggaaaatccccgcgacctgcaaacggatgcgtttcggctgtaacaggcgctccgtgctgtcgtgattcgggatcatgatggtgagccagtcaccctgcgcaacaccgagggattttgccgcgccgtcaccaaggattatctgatttttcccggcctgaaaatccgcccatgcattatccgccacaaattccggcaatccgctcaccaatttctgagtgaccggatccacacccattagttgcatggcctgtaatttactgcctttttctgccagcccggtaaattcaatatacgggctggcggccaccacacccggagtatttttgatccgcagcaggctctgcgcccaggtatcaaacggctgctcaacagtggaaatctgcccctgcggcaccacggaaagcacccggttctccagctcacgctcgaagccgttcatggcactcagcccgataatcagtaccgccaccccgagcgtgatccccagggtggaaataacggaaatcagcgagaccattcccgcccgtttccgccctttgctgaaacgcagcgcagtcagtaatgacagcggtagtgcattcatagcgccgtctccggctgtgcattcagaataccgtcgcgcatttccatctgccgccccattttcgccgccagggcgaggtcatgggtaaccaccaggaaggctgtgccgagggttttattcagttcggataacaaatcaaaaatgctctgcgcattgcgctgatccaggttaccggtcggttcatccgccagaaccagtgacggtttattcaccagcgcacgggcaatcgccacccgctgacgctccccgccggagagctcagacggacgatgatgggcacgcgctgccacaccaacccgctccagcatctcccccgcctgtgccagcgctttatcccgcgccataccgccgatcagcagcggcatcgccacgttttccgccgccgtgaagtccggcagaagatggtggaactgatagataaagcccatttcctgattacgcagcgccgacagagcgttctggctcatggcggaaagtgccgtgccgttaaaaatcacctcaccggaggtcggggaatccagcccgccgagcagatgcagcagcgtacttttccctgaaccggaactgccgacaatcgccagcatatccccgcgccggagttcaaaattaacctgtttcaggacatcagtttccactgtgccctcatgataagatttgcataactgacgacatgccagtaataactcactcataacgtaaagcctccgcgggttgtaccgctgccgcccgccacgcaggccagagtgtggataataaagagataagcatggcagccgcgccgatagtgatgacgcgcagcggctcaatgaccgtcggcagcgcgattcctttcgggatcagccccagcagcggcatcagaatattcagttgtgacgatagcagtgtgcccagcagaacgccgatcaccgagccgaggatccctgcccccgcgccctgaatcataaagatcagcataattttgccgcgtgtcattcccagggttttcaggatggccacttcggtctgtttttccatcaccagcaaggccagtgaggtaatgatattaaacgcggccacggcgataatcaggctgagcagcagccccatcatatttttctccatgcgcacagcctggaaaaactcacctttctgcacgcgccagtctgtccagaccagcccttccggtaatgtctgctgactgaggctgtccacctgtaacggctgtgacagatagagacgccagccggtgatattacccgccggatagcgcatcagacgtgccgcatcctcctgattcatcagcacctgggtgttatcggattcactgccggaggaaaaaaagcccgccacggtgaacaggcgctggctcgggatgcgtcccatcggcgtcagctgcgacacattcggcaccaggatacggacactatccccgcgtttaagccccatgcgtttcgccacgccttcgccgaccaccacatgatactgacctgccgccaggtcggatggccgggtattcaccagataattcatcagcggttcatcccccagcggatcaattccggtcacggaggcgatccccacattgccggtgctctgcaataccacatcaccggtgacaatcggggcggtttttaccacatcacgcagcccggctaattgtgagaccggatgtgtctgcggatccagcacaccgtttccggtggtgattaccgcctgcggcataaaatcgaggatactctgctgcaatgagcgttcaaaaccgttcatcacggatgtcacggtgataagtgctgtcacccccagcgtgatgccgatggcggaaagcagcgagacaaaacgggcaaagcgatccgtgccgcgtccccgcatgtaacgcagaccgattaaaaatgagacagactgaaacatgaaatctgaacgcccctgttgccaaagcgaagtgttcagggataataaaggctccggttgatgaatggaaccactcccgcccgtttgcggcagttttttttcattgacggtcagcgtgttgccggtatcagaccacctccggaccggcagcgcggcggccttttattgcccggacaagccactccggtatggcagaaccttgttacctgacagaaacacgcagcccgatggaaaaccgaatgtcgctgaaaacacgctatgaactcccggcccgtgccgcagacacccgccagctcggtgaaatgaccggtgcagcctgtgcggtggaaaccgcgtcgataattgaacaacacgacggccccgtcatcctggtgacccgcgatatgcagaatgccctgcggctgcgggatgagatccgccagtttaccgcgctcccggcagaaacccttgccgactgggaaactctgccgtatgacagcttttcgccgcaccaggagattatctccaaccggttatccacattataccgtctgccgaccctcgaaaaaggcgcactgattctgccggtcaatacactgatgcagaaagtgtgtccgcctgaatttctcaccagtcatgcgctggtgatggccaaaggggaaaagctgtcgcgggataagctgcgtgaagagctggttcagggcggctaccgtagtgtcgaacaagtactggagcacggcgagtttgccattcgcggcgcattgctggatctgtttccgatgggcagcgaactgccgttccgaattgatttctttgatgatgaaatcgacagcctgcgcacctttgatgtcgacacccagcgcaccctcgatgaagtgaatgcgatcaatcttctgcctgctcacgaattcccgacggataaagatgctatcgagctgttccgcagtcagtggcgggaaacctttgaggtgcgccgcgacccggagcatgtttatcagcaggtcagcaaaggtaccctgcccgccggtatcgagtactggcagccgctgtttttcaccgcaccgctggtaccgctgtttgactatctgccggataacaccctgctggtgacccgggatttacaggaatccgccgaccgcttccgccgtgatgtgcaacagcgttttgagagccggggtgtggatccgatgcgcccgttactgccgccgtcacagctgtggctgacaccggaagaactcaatcagcagatgaaaacgctgccgcgtgtgcagctcaataatgacaaactgccacgcaaagccgccaataccaacctcggctataccgctctgccggatctgaaagtcaatccgcagctgaaatccccgcttgacccgctgcgccgcttcctggaaagcacagaggctgccgtgattttctcggtggaaagtgagggacggcgcgaaagcgtacaggaactgctggcgcgcatcaaaatcaaaccggcggaaatccgcagtctgacggatgctaccgtgccgggtatttatgtcatgatcggtgccgctgagcacggctttgttgataacgaccgtcagcgcgtcctgatctgcgaaagcgatatgctgggtgagcgagtggtgcgccgccgccaggacacccgccgcacaattaacaccgacaccctgatccgcaacctcgcggaactgcgccccggtcagccggtagtgcatctggagcacggggtcggccgctatcagggattaaccaccctggaggccggggggatcaaggcagaatacctgatcctcacctacgccggggaagacaaactgtatgtcccggtgtcatcgctgcatctgatcagccgctatgccggaggggcagatgaaagcgccccgctgcataaactcggcggtgaagcctggagcaaagcacgtcagaaagcagcggaaaaagtccgcgatgtggcggcacagttactggatatttatgcacagcgggccgtcaaacccggctttgcctttaaacatgatcgcgaacagtaccgcgagttttgccagtctttcccgtttgaaaccactccggatcaggagcaggctattaatgccgtgctgagcgatatgtgtcagccggtggcgatggaccggctggtgtgcggtgatgtcggtttcggtaaaaccgaggtcgcaatgcgggcggccttcctcgccgtccataaccacaagcaggttgctgtgctggtgccgaccactctgctcgcgcagcagcattatgataacttccgtgaccgtttcgccaactggccggtgcggattgaagttctgtcccgtttccgcagcgccaaagagcagcagcaggtgctggatgataccagagaaggaaaagtggatatcattatcggcacacataagctgttgcagagcgatgtgcactggcatgatctcggcctgctggtggtggacgaagagcaccgctttggtgtccgccataaagagcgcatcaaggcaatgcgcgccaatgtggatatcctgaccctcaccgccaccccgattccgcgtaccctgaatatggcgatgagcggcatgcgggacctttctattatcgccaccccgccggcaagacggctggcggtgaaaacctttgtccgtcagtatgatgagctggtggtgcgggaggcgattctgcgtgaggtactgcgcggcggccaggtctattatctctacaatgatgtggagaatattgaaaaagcccgcaaccgtattgcggaactggtaccggaagcccgtgtggcagtcggccacggacagatgcgtgagcgcgagctggaacgggtcatgaccgatttccaccatcagcgttttaatgtgctggtatgcaccacgattattgaaaccggtatcgatattcccagcgccaataccattatcatcgaacgggccgatcatttcgggctggcacagctgcatcagctgcgcggccgtgtcgggcgttcacaccatcaggcctatgcttatctgctgacgccacacccgaaagccatgaccaccgatgcccataaacgcctggaagcaattgcttctctggaagatttaggagccggatttgctctcgccactcatgacctggaaatccgtggtgcgggtgagctgctgggcgaggatcagagcggccagatggccagcgttggtttcacactctatatggaaatgctggaaagtgcggttgattccctgaaaagcggcaaagagccgtcactggaagatctcacgcagagccagaccgaagtggagctgcgtatgccggccctgctgccggaagattacctgccggatgtaaacatgcgcctctccttctacaaacggattgccagcgcgcgcagcgataccgaactgaccgagctgaaaattgagctgattgaccgcttcggtctgctgccggatgccggtcgtcacctgctggcggcagcgggtctgcgcctgcaggcacaggacctggggatccgccggattgaggcgcaggagaaaggcggttttgttgagttcagtgagaaaaaccatgtcgacccggcgtatcttatcgggcttttgcaaaataacccgaaacagtaccggctggacggcccgtcaaaactgaaatttatctgtgacctgaccgaccgcaccaaacgcattgagtttatcgcggatttactgactgcatttgccgctcatccggtataacgtacaacatcctctctgtcaggtgccggtttcggccggcaccttaaaaatgaataaaaatccatttattgtgaatattaatttgcaaggtgattattagttcggttagtatttaccaaaatataatgacaacaacagggtaaatactatggatcgtcgttcgtttctgaaatcaacagggatcgcgctcggcggattaaccgccgcctctctggtcaccaccggtcaggccgccaccggtactgtctcacccgctgccaaagcagcgccgctcagcgcggaaaatccgctgctgctgaacttcaatgaaaactcactggggatgtctccgaaagcccgtcaggcgattattgacgcccttcccggcgcattccgctatccggatgctgcccgcgaagcgctgattgagcagattgccgcgcatttctcactgacaccggaacacatcagcctcggaaatggttcctcagaaaccattcaggcggctgtgcagatgctggtggcggatgcacagaaaaaacagcagccggtgcaactgattgtgccggatccgacattcaattatgccgaactgtatgctgagccgctgggcgtcaatattgtcaaagtgccgctgaaagccgatctctctttcgacctcacagccatgcaggcgatcgccgataactttgccggtcattccgttatctatatctgtaacccgaataacccgaccgctatgatcaccccggcatcacaactcgcacagtgggtaaaccaggcaccgccgcagcagaattttattattgatgaggcatatgcggaatttgtgtctgatccgcaatttaaaagtgcggttgaatgggtggctgccggaaaatccaatattatcgtgacacgcactttctcgaaaatatttgccctggccgggcttcgtgtcggttacggtatttccgtaccggcagtaacggaacaggtaaatattttcaattctatcgataatactaatatagcaggtgcagtttccgcactggcatccctgaatgataaaccgtttattgattacagccgccattcaacggatgtttcacgggaaattgtggttgccgcactgaaggaattaaatctgccttatgcgccctcacaggctaatttcatcttccataaggtgaccggagatgtaaaaacctatcagcagcggatgaaagaaaaccatataatggtcggccgtgaatttccgccggtaaccggctggagccgcctgacattaggcacgccggaagagatgcagcaatttgtggcggtattaaagcagtttcgtcagaagggctgggtttaatttccggttacattaaataaaaaacgtggtgaataccggtttatgacataaaccggtattcttattttttgtctgtaacacactttattttactgtattcagcccgggtaaaatgatcagccgcccggtattatccaccggcatgacatcacccggattataattgattctgaccttaccgacggtgtcattgattctatacaccacatcatagccgacaatccggtgctcataggtgtatgccgtcgtacaggagcggtatgtcgggccaccgtacaccttcggtgcatgcagcagggtttcatacagcaggtacggggtgcagacctgctcagtcgggtggacgatatccaggagttcacgcttgtacggacccggcatggttgtcaggtcacagtattcatggcgtacaggcaccgttgccatgataggttcggatgagagaacctcagcaacagcgggatgtttattctttgtcacagcaaaagaaatgattaccgcaaaaataacaaacagaagcacaagccctgtgaatgttattcgtgataatggttttcgttcatttttattcattgtcaaattatataaatatccagcggtaataattgggattattcctatcaaacccggttttatttttaacgattaatcttaccggactatattcccacagcaccgctaaataaaagttaaataataatgatgaaacaataattctgtccctgtaatttattaattcaacctgactgtgtgtgtactgacaacgatcaacaataattaataaagagcagtatctgccttattttgttcattaccaccggaattatctgttagtgatgatactgaactcctgttaaataatgcattttccggctttatatcaaatctgtacaatgtatatttccctgttctgagcagggtttattattataaaaaatgacgcccggaagcgtcatttttggggaagatcaattaatgtaatttcagccgcggacggataatccggtttataccgccaaccagcatcatcagcccggttttaatataaccgtgcagcgcaatctgatgcatacgatacagagaaatatacatcacacgggcaatacgcccttcaatcatcatattcccgcgcatcaggttacccatcaggctcccgaccgtactgaaccgggagagggaaaccagtgagccgtgatctttaaacacataatccttcagcggcttatcattgagtaccgcaaggatgttgtgatagcagcgggtcgccatctgatgtgctgactgcgcgcgcggcggaacaaatccgccctcttttttcgggcaggatgagcagtcaccgatagcgaaaattgcgtcatcacgggtggtctggagtgttggtttgaccaccagctgattaatacggttggtttccagcccgccaatctctttcaggaaatcaggcgctttgatacctgccgcccagaccatcaggctcgccgtgatatgctcgccgtctttggtgttcaggccggattcatcggcgctggtgaccatggtctgcgtcatcacacgcacacccagtttggtgagctcctggtgagcggcaccggcaattttcggcggcagagcaggcagaatacgctcacccgcctccaccagcgtcacattcagtgcatcggtattcaggcctttaaaaccgtagctgtgaagctgctcaacggcattatacagttctgctgacagttccactccggtcgccccgccgccgacaatcgcgatattcactttgtcgccttcgccgtggctggcggagtatttcaggaacaggttcagcatctcattatggaagcggtttgcctgtgacgggctgtcgaggaagatgcagttttctttgatccccggtgtaccgaaatcgttggaggtactgcccagcgccatcaccagaatgtcataatccagctcacgctccggtaccagcaggtcaccgttgttatcacggatttctgccagggtgatatttttactgtcgcgatccagtccggtcattgaacccagctggaaattgaaatagtgattgcgggcatgcgccaggtagctcagggcatccacgccgtcatccagagaaccggtcgccacttcgtgtaacagcggtttccacaggtggctgctgttgcgatcgaccagagtgatttccgcttttttcttcttacctaatttgtggccgagttgcgttgccagttccagcccgcctgcgccaccgccgataatcacaatcttcgtattcggtgtagtcataacatcctctgaaaaataatctaacgttatctcagggctcttcaggaaaaacagtgagataacatcagataaaactgaatcgtgtcacaccatggtataccacaacaggtaatttggtcataccatatttgatcataatcaaattctgggtaatccggcggaaaaatgcaaacattattttaaatttaacaaaactattttacttttggtttacctctgatgctttctttaatcaccggattaacttttcacacccgcagatgaaaaaagcccgttatcttgctgattcagcaccagaaagttattgatataacgcaatgaccggaaagatacgtaagagaacgatcacagaaaaggcagatttgagacaggaatcgcttcagttgcgggggaaaaaaataccgcgccttcagcaggcgcggccgttttacagagaggcggtgttatcaggcttttttaaacgcggttttaaaccctttgatttcctgcagatgacgggacagatccttaaacttgtgggtctgttcttcatcccagataacctgatagtacggtgacagcgtgtcatgcgcacgctggttatccagcgcctcatcattgcgggacaacagcaccaggcagttctgccggttcagctcgcggaaatccgagatacacttggtcatgatatccagatactcttccgggcggtcgattttgccttccatattttcatacgggaacaggttagggttcaccatcacctggcggatcccgcacagatatccgacacgctcagcccagaagccccccagacccacgcccagcacaatggccggtccttcgctctgttttaccgctttatccacttcggtcagcagatatttcatgtcataacgcggatgaagcgtgctgtaactgataaaacggacatccggatccgcaaatttcagctgcatcactttttcatgattgcccgggctggttgaatcaaatccatgaagataaataatcatgctcgctcctgccattgttcgtgtaatacggatagggttttgttcgcctgctgccagcgctcactgcgctgcagttcggtcagatcataacctttaccccgatgatacaacttatcaatacgttgtgccgtgataacaggcaaattatcaaggatagtcacagcacctctgcggttattacagaccaggatcatatcgcagcccgcatccagtgatgcctgaccacgctctgcatagccgcccatcaccgccgccccttccattgacaggtcatccgagaaaatcaccccgtcaaacccgagttgctgacgcagcaccgatttcagccagtaagatgaaccgctcgccggacgatcatcaatctgtgtgtagatcacatgtgcgggcatcacagcatcaagcaggccgcgctggataaattcgcggaaaatcgccatgtctttaccacggatcaccgccgggtcgcgctcatcacgcggcgtttccttgtgagaatccgcactgactgcgccgtgccccgggaagtgtttaccggtgctcgacatcccggcactgcgcataccgcgcacaaagcgttccgccatctgcgccgcaatgtcgccgtcctcatggaacgcgcgtgagccgatagccgcgctgccgtgccccagatccagcaccggcgcgaaactgatatcaatatccatagcgatcatttccgccgccatcagccagcccgcctcttccgccagcgcagagccggtgagcaggtcattaaactgtgcaaaagactgtgccgccggcaggcgggtaaagccatctttaaaccgctggacgcggccgccctcctggtcaaccgcaatcacaacccggttgtcgcgggtggcttcacggatctgccgcgtcagttcccgcagctgtgccgtgtcatggaaattacgggtaaagagaatcactcccccgactgaagggtggcgcaggatctcgcgctcttcgctgtccagctcatacccttcgacatctaacattacaggacccatggtgaaacctcgttgtatttacctgagcccggcggcggctttcagcgcggccgggtattgcagaaactgcgggtcgccggtttgtccccagcggctctcgaaccacataaccatcatataatctgcccgtgcctgccagcggcaggtctgcgccagtacgcgctgcggacagtgataagcagaataataacgcagaaaagtgtgaattaacgtcagtgaccagtgattggcacgaaaaagtgtggcgagagacagaccgatatcggtatcagcagcatattcccagtcaatcagatgcagttcccctgccgccgtcacaatgttgccggggtggatatccatatgtgcaggcgccagtttcagcggctgaggctctgcttcgcgcataaagtgacgatgaatacgcaacagctgcggggtgcggcggcgtttgtcggtcaggtgaaagtggcggtctgcctgcgctttgagcggcagacgatacccggtaagcggctgattatgcagattgctgaccagcgccgccagctgcggaataaagtccggttgctgtatccgttccggcggcagtgtttcaccctccacccggtacaaaagcagccagccgtggctgaacccggccacgcgcggagcaagaccgctgtcacgcagccggtgcaggatacgcgcctctttctgacggctgacaccgatatccgcactgtgcacggtctgtgctctgccaatcagagatacacctttttgttcaatactgacactttcccgcgtcagcccgttcagcggacggattgtccagccggcggcaggcagtgcgggaaagtgttcagcgaggcataacagtaacgcgcggttactgctcaagcaccgcgcccttaccggaccagatgatttcaccgctgctgacagacatcagttgcatctccatctgacgggcatcacgggtaccggtcaccacgctgtacagcacatagtcggcattcagataacgcgccagaccgatagctttgctgcgcagggtcagtgtatcgttatcacccatacccagcaccgacatggcactgctgaccgcaccggccgggatcacattcagtaccccggtttttccgatggtattcatcagcgcaccggtcgcaacgctggtctgcaggctgctgttggttttattaccgactttattcaccagcagcgtacggccctgattcacgccgtcgctgtgaaccatctgattaaccagtggtgtaatactctgttcccactcgatttttttcattttcggcggaaccggcaccgtatccggcggcggcagcggcagtggcggcggcgtggtatccggcggcggtgttacggtacccaccggtaccgggggtgttaccggtgccgttgaaggacacccggcgagcagccagactgacgctatcacacataaaagacgtttcatcaccgttctcctgtcagccggttatttcgccagcatcggccccagatgatggccgccgaccagatgcatatgaatatggaacacttcctgtccgccgtggcggttacagttcatgatcaggcggtagccgtcatccgcaataccttcctgctgtgcgattttggccgcgaccgtgatcatatgacccagaacctgttcatcttccggcgtaacatcattcacagtaggaataagatggttgggaataatcagaatatgtgtcggtgcctgcggggaaatatcccggaacgccgtcacgctgtcatcctgatagacgatatcagacggaatttcacgacgaataattttactgaaaatagtttcttcggccataacctgctcctgtaattaatcagcctgacagatgtgtgcggatttaccggacagacacctgaaacagacggcagaaattgtcagtggtgatctcagcaagcgcctcaacgctcaccccttttaatacagccatatactccgccacatcacgcacatacgcgggctggttctctttaccgcgaaacggtaccggggccagatacggcgaatcggtttccaccagaatgcgatccagcgggacaatgcgggcggcttcgcggatctgctccgcattgcggaacgtcacgatgccggaaaaggagatataaaaaccttcatccagcagcgctgatgccgtctctttgtcttcggtaaagcagtgtaacacgccgccgcactccccggcctgttcttcgcggataatcgccagggtatcctcacgggcatcccgggtgtgcacaatcaccggtttattcagctcacgtccgatacggatatgctcgcggaaaacctcacgctgaagcgcggcattctctttctgatagtagtaatccagcccggtttcgccgagggccaccacccgtttatccgccgccagttcacgcagctgtgtgaaatcatacggctcatccagattcagcggatgaataccacaggaaaaggccacatccgggcgctcaccaatcagctcgcgcatttttgtgtaacccggcagggttgtcgccaccgccagtgcgtatttcacatctcgctgcgcggccttttgcataacatcatccacactttcatgctttttttcataatcaaggcaatcgaggtggcagtgggaatctactaaaaacataattaactcattattttaaattaggtgatgcagaaaacagggtttcctggtgtaacaattgttctgtcagcagcagttcctgattcacgccggtgatggtcatcagccggtggcggcaggtcagccagctttccgctgcattcagtaagtgtgcactgctgtaatgcgctgccagttgtgcaatcagagcagactggtcctgattcagacaggcaggtgccatattctgctgatattttaccgcatccataaacagggtggtcagccagctgatgcgcttttccgcatcctgatgattcagttcagataacagcgacagaaaatccccgctgcgcacggattctgccagctgggtaaacagattcagccggttctgccagtcagcggtggtcagcagtgacagtgccgccgccggggcattgtggcaaagattcagcgcagtctgccgcgacaccgcatcagacggcggatgctcgcgctgtaaccactgtaaaccggtctccgctgacggcggtgccagatgataagcaaaacagcggctgcgcagtgtcggcagcaactgctccgcccgcaggctctgtaacacaaaccaggtattctctgtcggctcttccagggttttcagtaaggcgttggcggctgcttcggtcagcagttccgcctgcggaatatgcaccagtttggcaccactctgctgggcgtgctcatacagtttttctgtcacggctctcacagcatcaatcccggtggcagatttacccttttccggctgcagcagataaaaatccggatgggtgcctgccagcatcagtttacagctgtggcactccccgcagcttttgatgccctgcggctgctgacacatccgcagccgtgtcagggcataggccagctcatcagtgccggtgccgggcataccgtacagcagcagagcatgatgcccctgaccggacatccacgcggttgccagctggcggtaaaccggattaagccacggataccagttcattacgcctcttcctgctgtgccagccagttcagtacggcagtgcggattgattgatggacgttatctattgattgcgaagcatcaacggttacaatgcgcggatcggattcagccagctccagataacgggcccgggtgcggcggaagaaatccagtgattcctgttcgattctgtccagctcgccccggctgcgggcgcgggccaggccggtttccggcggcagatcgagatacagggtgaaatcaggataaaaatcccccagtacggtatcacgcagtgactccatcagtttgcgatcgataccgcgtccgccgccctgataggcctgagaggagagatcatgacggtcgccgatcacccattgtccgcgcgccagtgccggtttgataacattatccaccagctgaatacgcgcggcatataacatcagtacttccgctttatcagtaaccgtttcgccgtcgattccgtctttaatcagggtgcgcagcttttctgccagcggtgtgccgcccggctcacgggtatagaccaggtcagtgatgccgttttcacgcaacgtatcaacaatcacctgacgtgccgtggtttttccggcaccttcaagcccttcaattacaataaatttgcctgtcattgtttttttaatccgttacggtaatccgcaaccgcccggttgtgatcccgcagattcgtggtaaatacatgtccgcctttgccgtccgcgacaaagtaaaggtaacccgtggtgtccggtttggctgccgcatccagcgaggcactgcccggcatggcgataggtgtcggcggcatgccgtcaatctgatacgtattatacggcgttacccgcaccaggtcgctgcggtaaatcgtgccctgataacgctcacccatgccgtaaattaccgtcgggtcggtttgcaggcgcattttcagtttcagccggttcataaagaccgacgccacttttttacgttcaccgtccacgccggtctctttttcaatcagcgaggccataatcagcatttcatacggatccgcatacggtaagtcggtattacgggtcttccaggctgccgcgagtttggtttccatctgctgatgtgcccgcttcaggatttgcgtgtcttctgttccggctgtatagagataggtatccgggtagaaacgcccttccaggtggctgccggccggcaggccgagcatttctgtcagtttatctgccggtaaatccgcgagggtctgtttcaggtaaggggcttctgacaagattttctgccagtccgctaatttactgccctcaacaaaacggatactaaattgtgcctctttaccgctgacaaacagttgcagcatgcttttgaccgtcatatccggcgtcagtcggtaagtaccggctttgatttttgccagatccggctccagttgcagcagccagtcataattgtgtgattccgggataatcccgctttccgccagttttttctccagcgccacacgaccggtgcccggcggaatggtgaaaatggtttcttcagtgacagaaattttttgtccggaaaatgcgttcacctgatgataaagccagtacgccacgccgcccgcaactgcgagcagcaccaaaaatgtcacaaggaaaatccgtgtttttttcatcagtcattaactctgttaattcagggtattgctgccggacagtgcggcaaaagccaggtaaagagcgagcgggaggtataatgccagtgatgacgggcatccgcgcggatatcattgaccggcatgaccggcatcagcgcgttgcacataatcacttcatccgcttttgccagcacctgcggaaaacgttcggtttcataacagcggtaacggctgcctttcagcacatccatgatatgcgcgcgcatcacaccggccacaccacatttgctcagtgacggggtaaacacatcatcgccgcagcgccagaacagattggcgctgcagccttcggtcagaaggccgtcagtatcacagacaatggcttcatcggcctgctgttctgccgtataacggcggatcagcacctgctccagccggttcaggtgtttgataccggccagatacggattgaccgacaatggcaccgggcttttcaccaccgataacccgcgctcctgcaataccggatagctttccggatatgcggagcggatcaggatcaccagcggcggtacatccgcacgcagataaccgcgtccctgctcaccagcggaaacaatcactttcagcacaccatccgctgtaccctctgcggcctgcattatccactggggcagcagcgcgtcatccggcggtgtcagccccagcccggcacaaccactacggagccggtgcaggtgacgtgaaagcagcgacggtttgctgttcacaatgcgcatcgtggtaaaacagccgtcaccaaactgcacactgcgatcagaaatcgcgatggtgtgctgcggtacaccattaacccagtaatgcgtctgttgtgtcatagccaactcattgttttaacggttattatttaaccgtcattcagtatgcggacagacctgtataatagtacagctgtgatttttgtgcaaaactgcgatagcgtcacccgccaggtaaaaaaaaagcgccgtcaggcgcttttctctcagaaaacagactcagatcttacggaaaatcagggaaccgttggtgccgccgaagccgaaagagttacagagtgcgtattccataccttccactttgcgggctttgcccggtacaaagtcgagtttgcagaccgcttcatcctgattatccaggttgatggtcggcggtacaatctgatcacgcagtgccagaatggtgaaaatggattccactgcaccggcggcacccagcaggtgaccggtcatggatttggtggaactgaccagaacgttggttccttcaccaaataccgtttcaacggctttcgcttccgccacatcacccgcagaggtggatgtgccgtgcgcattgatatagccgatgctgtcagcaggaatgcctgcatcctgaatcgcatttgccatggccagtgcggcaccgtcaccgttttccggtggtgatgtcatgtgataagcatcgctgctcatcccgaaaccgaccagttccgcatagattttcgcaccgcggtttttcgcgtgttcgtactcttccagcaccagcataccggcaccgtcaccgagcacaaacccgtcacgatctttatcccacggacggcttgcgccctgaggattgtcattattggtggataaggcacgcgcagcaccgaacccggcaacacctaatggtgtgctggctttttcagtaccaccggcaaccatcacatccgcatcaccgtaagcgatgatccgggcagcatgaccaatgttatgcacgccggatgtacaggcagtggcaatggaaatgcttggtccgcgcaggccgtacataatacttaagtgtccggcaaccatattgatgatagttgagggaacaaagaacgggctcactttacgcgggccgccggcagccagagagctgcagttttcttcaatcagtccgagaccaccaataccagaaccaatcgcagctccgatacgggttgcattggcttctgttacttcgattccggaatccgcaattgcctggataccggctgcaataccgtattgaatgaagagatccatcttccgggcatctttgcgcgaaatattaaaatcttcgtgattgaaatcttttaccatacctgcgaatttggtcgcatggttagaggtgtcaaaatgatcaatcaggctgataccactctgcccggcacacacagctttccaggatgaatcgactgtattaccgacaggagataacatgccaagtccggtcacgactacacgacgctcagacacgcttatcctccgggggggaaaataaaagaaacaaggcggtcgggtgaccgcctggacatgagggatgcttacttgcctgcgttctcaacgtagtcaatagcagcctgtacagttgtgattttttctgcttcttcgtctgggatttcgatgtcgaactcttcttccagagccatcaccagctcaactgtgtcaagagaatcagcgcctaagtcatcaacgaatgaagcttcgttttttacttcttcctctttaacacccagttgttcaacgatgattttcttaacacgttcttcgatagcgctcatactattaaatttcctatcaaaactcgctatatgcgatggttttcgtagtttataaaatacaggaaaagatgcaacccaatcccggctggtctaaccatataaatactcacttttgcgtgtgtttacacaaaaacagcaaatggttagctcaaacattaaatcatgtacatgccaccattgacatgcaatgtctcgcctgtgatgtaagccgcttcatcagaagctaagaaggctacagcactggcaatctcttcagcatcacccaaacggttagcaggaacctgagataaaatgcctgcacgctggtcgtctgtcaatgcacgagtcatatcggtttcgataaaacccggggcaacgacgttgacggtgatgccgcgcgacgcgacttcacgggcgagtgatttactgaaaccaatcagcccggctttcgccgccgcatagttagcctgtccggcgttccccatcgttccgacaacagaaccgatggtgatgatgcgcccgcaacgttttttcatcatggcgcgcataaccgctttggacagacggaatacggatgaaaggttagtgtcgaggatatcctgccactcatcgtctttcatacgcatcagtaagttgtcacgtgtgatacctgcattattaaccaaaatatcaatttcgccaaactcagcgcgaatattttctaatacatggtcaatggatgcgctgtcggtcacgttcagggcaaggcctttaccctttgcgcctaagtattcactgatagcagccgcaccgctttcgctggtcgcagtaccaatcacagttgcaccacgtgctgctaatttctcagcaattgcacggccgattccgcggctcgcaccggtgacaagggcaattttgccttcaaagctcatctcaacctcagcgattttcaagtgctgtttccaatgatgacatatcattgacagcagatgatgttaatgttttcacaatacgcttagtcagcccggtcagtactttgcccggccctgcttccagcagatcttcaataccctgcgcggccataaactcaacagtttctgtccagcgcaccggattataaagctgacggactaatgcatcacgaattgcatcggcggaagtctctatcttaacatcaacattgttcacaacagaaaagattggtgtattaaatgtgatattttttagcgcaacggctaatttatcagcagccggcttcattaatgcacaatgtgacggcacactgaccgacaacggcagcgcacgttttgctccggcttccttacataatgccccggcacgctcaacggcgtctttctcaccggcgataaccacctggcccggcgagttaaagttaaccggtgatacgacctgaccttgtgcagcttcttcacaggctctggcgatagcatcattgtccagaccgatgatggcatacattgccccggtaccggccggaacggcttcctgcatcaggcggccgcgtaattccaccagtttgatagcttctttaaaatccatcacaccggcacacaccagcgcggagtattcccccaggctgtgaccggccatcatggcaggcatggcgccgtttttttcctgccagacacgccagatggccacagaggccgccagcagtgcaggctgggtctgccaggttttattcagttcttcttccggcccgttctgaacgagtgcccataaatcgtagcccagttcagcggatgcttcggcaaaggttgcctcaacgaccggaaaatttgccgcgaggtccgccagcataccgactgactgagaaccctgtcccggaaataccattgcatatgcagacatgatttagcttcctgaaaaattaaaaacgaattaatgcagaaccccaggcaaaaccgccgccgaaggcttcaatcagaatcagctgaccgcgtttgatgcgcccgtcacgaaccgcttcgtcgaatgcagtcggtacagaggctgcagaggtgttgccgtgacgatccagggtaaccaccactttatccatgcccatatttaatttttttgctgtggcactgataatgcgcaggtttgcctgatgcggcaccagccagtcgagttctgatttatcaatattgttcgccaccagcgcttcttcaacgacgttggctaattcacggaccgccacacggaatacttcgttacctgccattgtcaggtacgccggtttttcgctgtctttgcgatctttattcggtaatgtcagcaggtcgccgtagcggccgtctgcatgtaaatgggtggagagaatgcccggctcttctgaggcttcaaccacaaaagcacctgcgccgtcaccaaacaggataaccgtaccgcgatctgccggatccagcgttttcgccagcacatccgaaccgatcaccagggcttttttcgccatcccggttttaatgaactgatccaccacactgatggcatagctgaaaccggcacatgccgccgccacatcaaaggagatacagctgtcaatgcccagcagtttctggatttcacaggccgcgctcgggaaaccgtgcgtggaagaagtggtgcccacaacaatcagatcgatatcaccggcaggaatacccgccatatccagtgcgttcagtgctgcctggtggcccattgtaacaacggtttcatcatcaccggccagacggcgctcacggatacccgtacgagtaacaatccactcatcggttgtgtcgaccattttttccagatcagcatttgtgcggatttgtgcaggaagatagctcccggttcctaaaattttcgtatacatattagttagttactcttgggtaataccatagcgagacgggatgcgattcgttcaggcacctgcttttcaacagtctgaaccgcctgcgttatggcagcgttgaatgcacttacattcgccgcaccgtgactcttaatcacaatgccgcgtaatcctaacagagaagcaccgttatactggtcggggttcaggtggctgaagcgtttattcagccattttgtcaccactttcttcacaagtttgtacagcagggatgacgatttgccttcattttgtgatttaaacatagaaaggatcacacgaatcaccccttccatggttttcagggtaacgttacccgcgaagccgtcacagaccagcacatcagttttaccggtcagcagttcgttgccttcggcatagccgatataattgatgtccggtatcgatttcagcacagtggctgcttcgcggatattgtcgagtcccttggtttcttcttcgccgatgttcagtaatgccacacgcggatgcgggatcccggccacatcttctgccatcaccgcgcccataacagcaaactgcaccagcatgtcactgctgcactccgcatttgcgcccagatcaagcagcaccgttttgcctttcttctgatttggcaccacggtcatcagtgcaggacgctcgatgccttcaatcgatttcagcatcagtttcgccagccccatcagcgccccggtgtttccggcactgacgcacgcctgtgcctccccctctttcaccagttccagcgcgatacgcatggatgtgcctttgctctggcggatagcctgagaaggtttggcatcaccggcaatcgtctcataggcagggatcacccgcagacgactgagcagctcagcattctggtttgcaagcagaggagaaatggaatcagggtgcccgaccagcaacagggtgagctttggattagatgccagtgcctgcagcgaggcaggcactgtgacatgggggccgatatccccacccatggcatctaacgcgatggttagattagtcaagatatcaacgtgcttaaaaagcagcagattacttgttgattaccttacgaccacggtagtaaccatcagcggtcacatggtggcgcagatgagtttcaccagaggttttgtcaacagaaaccagagttgctgacagtgcgtcatgagagcgacgcataccacgtttggaacgagttggtttattttgttgtacggccattgaccttactccttaagtacttttctttaaactggctaatgcggcaaacggatttggcttttctgcttccggaggaagctcaccaaagactttcaccgcgtcggacacttcacagtgttcagaatcatgtaccggaaccacaggcagagaaagaattaattcatcttcaatcattgccagtaaatctgtctcaccaaaatcatttacgtcaattggctcatactcttccggtaatgcctcagcctgttcatcgctgacaaccgggctgaaacaatacgttgcgcggacatgaagcgggaagatattaccacaccgctgacactcaagtgaaacatcagtttctgctgttcccttaatgactgtcagacgctgcgggtcgatttcaaacgtcaaatcaacatcaacatcgctgtccacactgactaccgattcggctaaccgcgtaacctgctcaggtgcatagcacccccggtaatccagacgcttctgcgcggcgcgctttgcatcaatagtcagaggtaattttatcttttgcataaggcgcgcatcttatattcgtaagacgatatagtcaaagaaaatatagacagcaaagagggcggtaacctgccttcccgctaaaaatacactcaataagcggcgcatagtttagaatgagtttattctttttaccacgactttcggaatatttatgatctcactggttctcgcctccacctccctgtaccgcaaagccctgctggaaaaactcggcatcccgtttgtatccgcagccccgggtacggatgaaaccccgcatccggcagaagacgcgcagtctctggtcatgcgcctggcgcgcgaaaaggcccgttcattaacgcagcagtaccctgacagcctgattatcggctctgatcaggtctgtgtgctggacggggaaatcaccggcaaaccgcatcattacgatgctgcctttgcacaactgcgcaaagcctccggtcagtgcatcaccttttataccgggctgagcctgtacaacagtgccaccggggaagatcacacgatatgtgaaccttactgtgtgcatttccgtacactggatgatgacgaaattcgtgcctatctgctggcggaaacgccctatcagtgtgccggaagctttaaatctgaaggtttaggaatcgccttatttaaaaaacttcagggagatgaccctaatacactgataggtttaccgctgatccgtctgacagaattactgattcaggccggatacaacccactgcggatcccccgctgacacacgccggggcatccgatgattctgaggaactgacatgaagctgaaaatgatcgctgccgcaacgctgctgttcagtgctgccggtctggctgccccgtcactggcggataaaacaacctttgttgccgactgtacaaaaggtgctgtgaccaacctgaaaaacccggataaccgcagcaaagtcccggcggtctgtgagtgtgtgtatgacaactcactggcgaaattcggcaaagacgggctggaaaaactggatgaccgggtccgcaaaggtcaggcactgaccgaacaggactctcaggcgatcggtgagattgcacagagctgtaccacaaaaattatcggtgtacagccgcagtaaccgcagaatgccctctgtataagaaaaaacccgcgttctgcgcgggttctttatttctgttctctgcttattttgcctgtttcgaccgcagtaccgtcaggcagtggcgcagtttttcatccagcggtgcctgaaggcgcatcgcctcaccggtggacggatgggtaaaggcgagtgcggccgcatgcaaaaacagcctgttaagccctgtccctttcagctgagcatcaaactgcgcatcaccgtaacggttatcaaaggcaataggatgccctgcatgcagtgtgtgcacacgaatctgatgtgtgcgcccggtgaccggactggctttgaccagcgtggcagcctcaaaccgctcctccactttaaagcgtgtttccgatggcttgccttccgggctgactttcaccacgcgctcgccgctctggagaatatttttcagcagcggtgcctgtaccacttttactgaggattgccactggccgcgcaccagtgccagataatctttctgcatctgtttcagacgcagctgctcgtgcagtgcccgcagtgcggaacgttttttggcgatcagcagaataccggaagtatcgcggtcaagccggtgcaccagttccaggaaacgcgcctccggacgcagcgcccgcattgcctcaatcacaccgaaactcagaccgctgccgccgtgtaccgccgtacccgccggtttattaatcaccagaatatgatcatcttcatacaatacgcactctgcgagtgcagaaaccttatccagtttcgccgacaccggggcatcgtttttctcagccacacgcaccggcgggatacggatgctgtccccgtccgcgattttgtattccggcttaatccggcctttattgacacgcacttcccctttacggatgatgcggtaaatcatgctcttcggcacccctttgaggcgcgcgagcaggaaattatcaatacgctggccggcttcatcgccggacacaacaacaaattgaactgtctgattatcagttttcatgaaacggggggctatcctctgaaccgttgctccgtaaaccggtatatttttccggtgaaacaggcggcaaatgtgcatcaatgttttacgcggctattttcccattttttccggaaaaagaccaaggattaacgtcattaacaaatttctgcataattttcaccgaaacatgcaatgtcaccttgctataaccacaccggcaatggaataatgcatgcgccgattttggcaaaacagatattttatctttgtctgaccgatgacaacgcagcaatggcgtaagacgttatttccggtcagataatcagcgggctgcgggttgcagcttaccgggccggtatcgcgtataaacgtgattttcagccggcaacggggattcagacaagactgaacctcaccgacacaatttgcacctctatacgatcgacagccgggaggctgacggtgcggtaaaagccacgaggtcatcggttccggtagcaacgaaattgcccgcagcgcactaattaaatgaaaaaaattgagtaacttataatgaaaagaatgttaatcaacgcaactcagcaggaagagttgcgtgttgcccttgtcgacgggcagcgcttgtatgatctggatatcgaaagccccggtcacgaacaaaaaaaagcaaacatctataaagggaaaatcacccgtattgaaccgagtttagaagctgcttttgttgactatggcgcagagcgtcacggtttccttcccgtcaaagaaattgcccgcgagtatttccctgctaattaccacgcatccggccgcccgaatatcaaagatgtcctgagagaaggtcaggaagtcattgttcaggtggacaaagaagagcgcggtaataaaggcgcggcactcaccacctttatcagcctggctggcagctatctggttctgatgccgaataacccgcgtgccggggggatctcccgccgtatcgaaggggatgaccgcaccgaactgaaagaagccctgtctgccctggatatcccggatggaatgggtctgattgtccgcaccgccggtgtgggtaaatcagccgatgccctgcgctgggatctcgagtaccgtatcaagcactgggaagccatcaaaaaagttgctgaaggccgccctgcaccattcctgattcatcaggaaagtaatgttatcgtccgcgcgttccgtgattacctgcgcccggacatcggtgaaatcctcatcgataacccgaaaattctggaactggcacgcaagcacatcactgctatcggccgtgcggattttgccagcaaaattaaactgtatcagggcgaagtgccgctgttcagtcactatcagattgagtcgcagattgaatccgctttccagcgcgaagtccgtctgccgtccggcggtgcgattgttatcgacaccaccgaagccctgactgctatcgatatcaactcctcccgctcaacgcgcggcggtgatatcgaagaaactgcctttaacaccaacctggaagcggcggatgaaatcgcccgccagctgcgcctgcgtgacctcggcggcctgattgttatcgactttatcgatatgaccccggtccgtcatcagcgcgaagtggaaaaccgcatgcgcgaagctgtccgtcaggatcgcgcccgtatccagattggccgcatttcccgctttggtctgctggagatgtcccgtcagcgcctgagcccgtcactgggtgaatcaagccatcatgtgtgtccgcgatgcagcggcaccggaactgtgcgtgataacgaatcactggcgctctccattctgcgtctgattgaagaagaagcgctgaaagagaatacccatcaggtacatgcaattgtgccggtaccggtcgcctcttatctgctgaacgaaaaacgccaggctgtcagtgcgattgaagcacgccaggccggtgtcagcgtgattatcgtaccgaataaccagatggaaaccccgcacttccgtgtggtccgtgtccgtaaaggtgatgaaatcggtaccctgagctaccgcctgccggagaaatacgaagcggaatccgctgccggtgaagaagaggaaactcaggaacgccgtgcaccagaacaaccggctatcaatgcctttgctatcacatccgatgcaccggtaccggcacagactgccgcaacccgcaaaccggaaagcaaacgcgataaccgtcaggataaacaggcacctgcggcttctgaaggtggtttcttcagccgtctcatcaaaaaactgttcggctccgctcctgctgtcccggaagaaactgaacagaaagagaaaaaacagactaacgacaacaaccgccgcggcgggaatgatcgtaacaaacagcgccgtaaccgccgtgaccgtaatgatcgcaacggcgagcgtaccgagcgtgctgaccgccctgagcgcagtgacaacgaatcgcgcaacaaacgcgatcgcgatactgtgaatgaaccgcgtaaaggccgtaatcagaatacaccgaacgaagatctgacaccggaagaactggccgcccgcgaagcacagcagcagttacgccgtgaacagcgtgcagagcgtcagcgccgccgtcaggacgaaaaacgtgtccagcaggatgcgaaaaaactgcgtgcccagcaggaagatcaggatgcactgaacagtgacggcaacacggaagatgatgatgcaccgacaccggttcgtcagcgccgtacccgccgtcagctgaacggttctgtccgtatcactgatggtgaaacacagactaaaccggctgttgcagcaccggttccggttgttatcgataatgcaccagtggcagttcccgcagataccgacgtaccggcagcggcggaaaacaatggtgatgaggcacacagcgataacatcctgccgcgccgctcccgccgctcaccacgtcatctgcgtgtgagtggtcagcgccgccgccgttaccgtgaagaccgtcagctgacgcagtctccggttccgctggaaatggctgtattttcccctgaactggcttccggtaaagtgtggatccagtatccggttgtgacacctgctgcacaggcagaacaggaaatcgcagctgagacaccggaaatcaccgaaacaacagctgtgattaccgaaaccgcggttgtcgctcaggtgatgactgaagcggcagaaaccaccgttgtggcagaacagttctctctgactgtcgcatctgaggctcctcaggtcactgctccggaagaaacaccggttgcggatactgccactgaatctgtaccggcagaagagcctgtacaggaaacggctgacgttgtcgccagtgagcctgttgtgactgacgtgattgttactgagcctgttactgtcacggaaccagttgcaccggttgttgttgcagaaccggaagtgattgcagagcctgaggcagttgttgtggctgaacctgttaccgcaccggttgcggctccggttactgaaacaactgtcgttgctgccggccgtcatgcttattcaccgatgaccaaagcccctgctccggcaaccaccggcgaagcctttgttatcaccgaataccagcgtgaagcccgcgaagcctatgcgctgcacggtgcaggcggtcatgcggccactaaccatgctgcatcagagccgtcaaaaaccctgctctgataatccgcactgaactgaaaatggctcccccgggagccatttttttatggaaaagataaaaaaaaccgcgaatattcaattcacggtttctgctgttcagtctgtgcgattacttaatatctttgatatcgcccatcgctttgagttctctggagatttcgcggcgctcttttgacagatccgcattcttgataatgtactcatccacacgatcttcatagtcactgcgcatattggcaatgatagcctggatatcttcaatggacatgcccggcttgatgtattcactcaggttatcaagcagaagtacacgtttctggttatcacgaattttcttttcgttgtcagttatttcacgcagtattttgtttttacggcgaaacatacgaacaaactccaggacattgtgaaaggaaggcttggttgtgttgtccattattctacccttagtcatatctgaaatgtgattcattaaacaatacaggttaaccatgaccgccgacaagcaattccgccggttttctgcggttttcttcagtgtagcgtatttctgagcggaattgtttcagctaatataaattcagcacaaattaccgccattttgtgagatctgccatcaaatcgtattgccgggataatcaggactgaaattggtattttttccccgatttgctaccctgtagcccatcatttatcagaaaacgggccatacggtgtcttcagcacaatttttctttcacgattacgaaaccttcgggcaggatcctgccggtgaccgcccggcgcagtttgccggtgtccgcacagacagtgaattcaatattatcgccgacccggtgatcgcctactgcgccccggcggatgattatctgccgcagcccgctgctgtgatgataaccggcatcacgccgcaggaagccctgcagaaaggggttaatgaagcgcagtttgctaagctgattcatgacacctttacacagccggacacctgtattctcggctataacagcattcgttttgatgatgaagtcacccgtaatattttctaccggaacttttacgacccgtatgcctacagctggatgaaccgcaattcccgatgggatctgattgatatcacccgcgcctgctatgcgctgcgcccggatggcacaaactggccggagaatgacgaaggactgccgagctttaagctggaacacctgactgccgctaacggtatcgcccatgaaaatgcccacgatgcgatggcggatgtgtatgccaccattgccatggcgaaacagctgcgtggtgcacagccgcgtctgttcgattatttcttcagtctgcgcgataagcgcaaactcgcggcactgattgatattccgtccatgaaaccactggtgcatgtctccggaatgttcggggctgtccgcgccaataccagcctggtagccccgctcgcatggcatccggataaccgcaatgccgtgattatgtgtgatctcgccggtgacctgaccccgctgctgacgctggatgcggatacgctgcgcgaacacctgtacacccgccgtgatgaactgccggaaggcgcgtccccggtaccgctcaaactggtgcatatcaataagtgcccgatcctggcaccggaaaataccctgcgcccgcaggatgcacagcgtatcgggctggataaagacctgtgtgcccgtaatgcagaactgttgcatcagcatccggagatccgcgaaaaagtcgtggcagtgttcgcacaaccacgtgagtttccgccgcagaatgatgtggatcacatgatttatcagggctttttcagtgattcggataaagcggccatgacgattatccgcgaaacggatccaaagaatctgccggcactggcgctgagttaccaggatgcccgtctgccggagttactgttccgctaccgcgcccggaatttccccggcacactggatgagcatgagcagcagcgctggcttgcccatcgccgtgaggtctttaatcaggataatttaacccgttattttgagcagattggtgaaatgatgcaggaatatcagcatgatgcaaacaagacagaattactaaagaagctggtgcagtacgcacagcacctggcgcagtaatcagaacagactgccgggagggagactcccggcagtgaaatcatcccgctttattggcggtatagaatacccggcacagggattccctgtacttcggacaaacagagaccagccgcgtgcggctctctgtatcccgccccagttctttcagcacccctttggtgatcagtgaatccgcactgctgtgcttaatgccgatactgacattttcatcacgggcattcaggatatacacaatcagcgcccgctcatccgtgctgaggttatgcagcacctctgctttatggcacttgaccggaaccgctttgccgaaggcattcttgagtcttttaaacataatcatcagtaaacagggagaaaagctgattatagtgaatttaatcccttattaacattactgattatactttccgcagccacatccttcgtgcccttccccccaatattttaatttactggttttgcccagtcccgggttcagggtgttggtcggatcggtggctttatagaaggctttcagctgaggtttcgctttatacagatggccgacattatgctctgccggatattccgccccgcgcgtgttcaggatttccagcatttcctctttcagcgcatgcggatccacgcctttcttcacaatatagtcctgatggaaaacgtggcataaaaaatgtccgtagtagagtttatgcaccagtttactctcgatttccggcggcaggacttccagccacgcctgatcattacggcgcagtgcaatatccagtgcgaggatatcctccactttgctgctgttgaccgcgtgatagcggatggcggcaccggcggccacaaagcggtgcaggaaagcatccgccccctctttggcatcacactcaaagaaagcaccctctgcattgtcaaagaaagtgctcagccagttacgggcttcatcgatcccctctccggccattttcagcatcaggtgatgctcatatttatcgcggtactcttccatccggcgcggcagatggttcggccacagatgactgaataactgcattgtgcggtcaatcaggttttttggcagcagcgggattttattgaaaacagcatccatccgccctttgatagtgaacagcttcggcattttctcagtgccgagtttatcaatcatcaggaagctgtctttgccgtagacctttgcgatgtcataacattcgcggtgcatatattcaccggccaccggcagatgctcaaactccgcaagaatatgacggcggatatcttccagcacagaaggcgtattggtgccgatatagaaaactttgctctctccctgagacgggaaggtatcaaggcgcactgcaaacaccaccagcttaccggcacagccggaggcttcaaacaggcggcgttcgtcggcgttgaaacgggatggggtgtccgcatccacatcacggatacgctgatgataatcatggtcagaggccggtttatccgtgtcctcaatatccgcatcctgatactgacggtattccagacaattcagaatttcttccggcgtggatcctaaatcaatccccagatggttaaccagttctgcgctgccgtccgcattaacgcggccgtacagcgccagttcggtataagcgggaccgcgctgcaccagtgaaccgccggagttattacaaatcccgccgaccacggaagccccgatacaggaagaaccgatcactgaatgcggctcacgacccagcggtttcaggactttttccaggtgccacagggtgctgcccggcagtgccactacctgctgctgttttgtcagtacctgaattttatccaggcgcagtgtgctgataataataatttcgcggtcataatcatccccgctcggggtggagccttcggtcagaccggtattggccgcctgcatgatcacaattctgtcagcttcaacagcggctttaaacacctgccacagttcatacagcgtgcccgggaacaccaccgccagcgcgctgccttctccggaacggaagcctttgcggtatcgctccgtcttacgcggctctgttaaaatgtgtttgtgactgacaatatctgtcagtgcctgaataagacgtgcgccgtcaggttgttgattgttgatcatactttaccccgattcagattacttattgttcattaagtaattatgcctcttatcttatttataatacaaatactatttttaacaaatttaacagattaaccacgaatccggcttatctgaacaggttgatcagcagcgtcaccatcataatcccgactgtcaggatcaggattttacggacaatttctccgttggtgcggatagcatgctggctgccgaggtgattcccgagcagactggcggcgatcatcgggatactgagcaggaacgcgatatgcccggccataataaaggcgaccagcccgccggcatttgatgccaggttaaagattttcgaggtcgcggaggatttcagtaaatcgaggttattgatcagaaacagacagataataaagatactgccggtacccggcccgaaaaagccgtcatagaaaccgacaataaagcaggtgaaaaagaccagccatacagatttgcgcacggcgctgccctgttgtgcaccaccgagttttcctttaaaaaaggccgccagcaggccgatcggcagcatacagataataatataggtaatcgtttcagacggcagatatataatcgctttcgcgcccacccaggccccgaagaacgatgaaataatcccagccggaattatctgccagtaaaccgatttgtttttaatgaaattagaaatggccgccagcgtaccgacagagctcaccagtttttcctgtcccagcgccatatgcggcggcagaccggtcagcataaaggccgggatcagaatcagccctgcaccgccggcaatggaatcaatatatccggccacaaaagaggcgatgaccagcagtgccagtcccgcataaaaatagtctgccatcagactgtgctcaatatacatctacatcccttaattattatcattttctatactttcagagggttactatacgcgattacacataaaaaaacggcgcacagcatcaaactgtgcgccgttttcacgacataactgcttaaagacttactgttccggcatctgcggcatcggacggcggaaacggcgggtcagccataacatatagatcagacccagtgcaccccagctcagacccagttccatcgatttcgcatcgaggttgaaccagagcacggtcactgtcgcggcaccgataatcggcagcagcagatagttgatctggtcgcccagcgtcttgttacggcgctcgcggatgtagaactgtgaaatcacagacaggttaacgaaagtgaacgccaccagtgccccgaagttaatcagcgcggttgcggtaaccagatcaaaccagactgcactcagcgccagcacacccaccagcagcacgttcagtgccggggtacgccatttcggatgcacgtagccgaagaatttctccgggaacacgccgtcacggcccatcacatacatcagacgggatacccctgcctgtgccgccataccggaagccagtacggtcacgcaggagaacaccagaatgatggactggaagaaggcaccggccaccatgtacataatttcaggctgtgactcttccggattgttgaaacgggatacatccgggaaatagagctgcaggaaataagacaccgcgataaagatcagaccaccaatcagtgcggtcaggaaaatcgctttcgggatcactttcccggcattcggtgtttcttctgacagtgagctgataccgtcaaatcctaagaaggagaagcacagtatggtcgccccgcttatcatcgggatcagttccgcatcaatggaagcaaacggacggaaggagagcagcgtacccgccccttcacccgcagacacaccacggaccagcagaccgacaaacacaatcatcacagcaacctgtaccagtacaatcccggtattgaggtttgccacaacattgatgccgcgcaggttaaataatgtcatcaggaaaaccagacccgcgacgaaaatccatggcggacagtcagggaagattgcctgaagataaatttttgccagcagaatgttgatcatcggcatgaacaggtagtccagcagcgatgaccagccaaccataaagccgatatgcggactcatggatttctgggcataagtatacgccgagcctgcggacgggaaccgtttaaccagtttgccgtaactcagcgcagtaaaaagaatggctgtcagtgcgatagcataagaggtcgcaacatgaccgctggtaatttcggacacaatcccgaacgtatcaaagatagtcatcggctgcaggtacgcaagccccatcatgacaacctgaacgagggtaagtgtttttgcgagttgtacgcggttattggcagctgtacgattcaggccaatatcgagggtagtattatgcgacatgagcgaatccccccgtaacaccgacaatcatactgatactactatcagatggcgtgttaccgggaagacttcgcatctgcctgtaggcagtgaagtaagaaggggtttggagtgctgagcaggagcgccgtgctccgtagtcgtcgttgcagcagccagcgccgattggcacaggtgcaaaagtgaaaaattgcgccatttatcgcatcctcataccggtgtttatcgtccggtgtaattcagtaaacagttatccggcctatcggcccctttttttgtcggtgacaatattttagtgcaaaaaaaaaaccgatgcgtataaatgcatcagttatttttttggatggcgcattctgcacccctcagtcataaatttcaagctttgttcgccctgatccggtaatttttttacatactgctttaccggcagaatttctgtgatgaaactttgaatatttatagctgaaacgttaaaaaatccggctgttcgtgtgttttccagtcactctgcctgccataaaaaaacacgacgccctgaaaaggacgccgtgtttcggcacataataatgaatgatggttacatcagaagttataattcagaccgatattgtaacgacggccgtcaagtgtggcaccgtagttttcattattgatacggcgatccagcacgttatacacacccgccacaaagttcaggtctttattcagctgatagctgccgccgacatccaccgtggcataagaaccggttcctgtagccatactggtgcgggacagataatcggaggttttgccgcggaagttaatccggctccaggttttgatatcctgcgtgatatcccagttcagcgtggcgttagccatatgtttcggcatcttattcagcgctttgcctttgaaagcaccactcttctgctcggagtcggtgaaggtatagttcgctgtcagatccacagactcgacaatctgccagttcataatcgcttccacaccgcgcatattggctttatcgacgttgatacggtcactgatgaaatcgtaggttttgttatccggatctttttccgtacagatagtatcggttcctgtaccacaacggcggatttcggtgatcttatctttaaagtcagtgttaaagacagtcaggctcatattgagattatcctgattattccacagcacactgatctcttcggtgacacttttctccggtttcagatccgggttaccgaaaataacaccgttcagactgccgccgccggtcacctgaccccatgaagccgttgcctggcgcagatcaggtgaacggtaaccggtggacacgccacctttcactgtccagctctcatccagatgccacacaccgtaaacacgcggcgtccagtgcgtaccgaagttttcatccttatccatacgcagaccgccggtcagggtgaaatcattggtcagcgcccagtcatcctctgcaaacagcgcccagctgtagcggtcaagtttattgccggctaatttattgccctgatctttcagctcttcgaaacggtactgaccgccgaggctcaacatatggtcgccgagcggcataacagtctggttacgggcgatagtgtcgtaatactccatattacggcccgggtttttggtttcattacgctgaacatagctgttcatgctgccccagtcatagttaccgtcatgagtaatcgcatactgcgacatctcatacttgctgaagctgctctctttgctgcgcgcagaggcacttttcccgagacgggaatcgcggtgctgattatcttttttgaaatcaaaatcgatgctgttctgctcatccggcgttaatgtcagtgtaccgccgccgctggtcatgatctgacggttaaagccgttcgcgaaattatcttcaccgcgatgggaatactggccattcactttcatactcagcaggttatccaccagcggaccggcggcaaagaagctgccctgcccggtgttaccgctgtctttgcgttcggtaatggttgcatctgtccggacgctcgcatgccactcaccctgcgctttccgcgtgataatattgataaccccgcccatggcatccgaaccatacagtgaagacatcggtccgcgcaccacttcaatgcgatcaatcgcagtcagcggcggcaaccatccctgttcaattccggagttatcactattagggcgcgtttcgcggctggcaacccgtttcccgtccacgaggatcatggtgtacttcggatccatcccgcggatactgatatctgacgagctgccgccgccggtgaccacaacacccggcacatctttcagggcatcagtcacatcgcggtaggctttatcttccagttgttcgcgtgaaacaacggagatagtcgccgcagcatcctcaattttctgctggaagccggatgcggtggtaaccacaatcacgtcttctttatttgcagcctgagcagccatcacctgagcggcgagtgctgccataacacataccgccacttttctttttgaaaaaataaccattcttttgattctccaagagataatatatttatggacaatcgacattcgctctgagggatttatatccctttttttaaataataatgaccctgccattgcaggcatccgtcattattttattaccttttataaggttatttgtttttataaaaataaatcatacagaaaacaatgtattatcagcgcataaaatatatgcagcatgcagataatcaccctctgcggaaatatattccgcagagaataaaaaagaatatgtaatataaaccggttttattatgccagcaccgcaaccgcgcgcggcaccaggccatcaataacaacatgcggcacagactgcgagcagtgctcaatacggccgcgcacaccataaacggttgccaggctgtccggcgtaataaccgcttccggatccccttccgcaattaaattcccgtctttcagcattaatatatgatcaccgtgacgcagtgcgatattaatatcatgcacaaccaccaccgtaataatattccggcgctgagtttcacggcgtaccaaatccattacgtgatactgataatttaaatccagcgcacttaacggctcatccagtaataacagtgtcggctgacggattaatgattgcgccagcccgactaattgtttctgaccgccggataactgatccagataatgcagcgccagatgttcaatgcctaattgtgacagcagagacatcacttcctgctcactgtcgcggtcagaaataccgcctgaagcccgctgtgcaacaatcacggattccagcacatgcaggtgcaccccggcaggcagtgtctgcggcagataaaccacctgcttcgcgcgttcggcaaaattcatccgcgtcagatcatgaccgtcgagcagtaactgcccctctgccttgttcagaccggccagggagcgcagcagggtggatttcccgctgccgttcggcccgagcagcacggtgattttaccgcgcggcagaggctcaacattcaggtcttcaatgattttccgtttcggataaccggcattgaagtgtttaatctgtaacccgctctgagcagacattgcattcaaatccatcttacatgctccctttatgacgcaggatcatgctcaggaagaacggcacacctaccagtgatgttacaataccaaccggaataatcacccccggtatcaggtttttcgaggcaatggatgccatcgacaggaccagcgccccgattaatgcactcgccggcagatagaaacggtgatcctcaccgaacatcatgcgagcaatgtgcggcgcgaccaggccgataaacgcaatcgggccgacaaaagccaccgccagcgcagtcagaatactgatacgcagcagcgtaccgagacgcagacggcgcacgttaataccaaaactgacagcgcgatcttcgccgaggcgcagtgcggtcagtttccacgagttactcatggaaatcggcagcagaatggcaaaggccagtgtcatcacacccagttttacccaggtggcgcgcgccaggctgcccatcgtccagaaaaccagcccctgtaaggtgtcttccgtggcgataaactgcatcattgataccagtgcgttaaaggtaaagaccattgcgataccgaataacaccacaccggaggttgccactcgtgtccagcgggtgatgccgtcaagcatcagcgcggaaaacagggcaaaaataaaggcgttcgcggaaacaaaccactgatccggtacgcccggaataccaattccgaggactatcgccagcgccgcaccaaacgatgcggcgttggagacgccgagggtaaacggactcgccagcgggttattgaggatggtctgcatctctgccccggcaagaccgagagacatgccgaccaccacggccatcagggcatacggcagacgtatttcccagacaatcacacgggtgcccgcggatacactttccggcgacaccagggtctgccagagtgcatcaagggtcagcccggacggccccatggtgaaatcgagcaccacggtacagagtattaccgcaaccaccgcaaacatccacatcagccgcctgcgcagtacacgccggtaatgtgatttcacatcacagcttaattcactgcctgcctgttccggcttcgtctgtagcattgcttctgtggtaatactcattattcaaatacctgctgactacttaaaattatttaccgctgacccagtatgtgccggttggttcgacagccaggaactgactgtacatttcatccatggttttcttcggatccagatctttaaactgctccggatagaaccacttggcaaaggcctgcgcggcaatcacgttataaggtgagttataatagttgtgccagatagcatagtcacgcccttctttcactgcggtcagggtattaatgcccttacgctcagtaatggctttcaggctggctttggcatccgcttctgttgcctgcgcacccagctgaacacccgcatcggtgctgcccggggctttcgcgccgctgaccagataaatatccggatccgccgcaatcactttctccaggttcatggtacccagtggtgtcggcagaacgtctttggcgatgtttttaccgcccgccagatcgataaagttaccgaggttaccgttaccggcagtaccgcagcagtcagggaaagacccggcgcgcagatcgataaacacggtcggttttttatcttccgggattttgtctgtcacgtcagtgactaacttcatctgcttctgatagaaatcttcaaaggctttggctttttcttcgcggtgcagcactttacccagcacacgcatacccggcagagtgtttttcagcggttcgttgcggaaatccacaaagacaaccgggataccggctttttccagctgaccgaccagctcgctgtttttacccggtccgtgaccggccaggccgaaaatagccacatccggattgagggttaatactttttctgcactgacgctgtcctctgtcgtgttaccgatcagcgggatcttgtcgatttccgggaatttagctttgtagacagcataagactgcgggtcgagtttgcggaagtcaccctgccagccggcaatacgtgccagtggtttgtccccttccagcaatgccaccgcgtggatcatacgcccttcccctaacaggatgcgctccactttttccggtacttccaccgtacgccctgcggcatcaaccactgtttccgcccatgctgcgctgctcatcagaacagcccctgctgccaggctcatggtcagcccttttgctacagatactaatttcacgttaccgactcctgttatctgtcagaaattggcgttaacaataaagcaaataagaacccttatcaatacggaataattatcttcctcattacaatattcgttatcatcaggtgatagcgatatatcgaaagataatctgtaagtgatattcattattaacagataaaacgactgacttaacggataaacacagtttcaacccgtaaatacccctgcaaagcctgtaacgacaaacataaaaaaaacctgaccaggatcgtcaggttttttatcaatttacgtgatatgtcacaaaatcgggtcacacagccttatttatggctggccggaaagtccatttcgccgtagcggacaaacttagtacgcttaacaattttataaccaaaccagatggcgaagaacagcggcagaccgatataggtcgcgaccacacccacccagtcaatctgatcctgcaggaaggcttcgtagttctgaccgagggtgatggtcagacacagaataaaggcgaagatcgggccgaccgggaagaaaccggagcggtacggcagatcgttcaggtcatagccctgcttaatatagcctctgcggaaacggtagtggctgatggcaatccccagccaggcgataaagccggtcatccccgaggcattcagcagccacagatacacagactggttaccgaacatcgatgtcaggaagcagagcgcagcaatcaccgtcgtggcaatcagcgcgttacgcggcacaccgcctttggacagtttggcaaacagtttcggtgctttgccggattttgccagggtgtacagcatacgggtggaggcatacatcccggagttacccgcagacagtaccgctgtcaggataaccgcgttcatcactgctgccgcagagagcagaccggcgcgttcaaagaccagggtgaacggactgacgctgatatcggtttcatcattacgcagcagattcgggtcggtgtacgggataatcaggctgatcaccagaatcgccagcacatagaacagcaggatacgccagaacaccttacgcaccgctttcggaatatttttggccggatctttggattcaccggcagcgataccgataagttctgttccctggaaggagaagccgacaatcatggccaccccgatcatcgcggcaaacccgcccttgaacggtgcctcgccgacagtccagttatgccagccagcaccttccccgcctttcataatgccggtgatcatcatcacgccgacaacaataaacaggataacggtactgaccttaattaaggagaaccagtattccgcctcaccgaatccttttacagagataaagttaagcaggaacatgatggcgaggaacgccgcactccagacccagcccggaatctgatctgccgggaaccagtaggtcatcaccagctgtgctgccaccaggtcaaccgcgatagtcaccgcccagttgtaccagtagttccagcccagtgcgaaaccgaagccttcatccacatatttggcgccgtaagtggcaaatgaacccgataccggcatataggccgcgagttcgccgaggctggtcatcaggaaatagaccatcaggccgataatggcataggttaacagcgccccgccgggaccggcctgggcaacagtggcaccggaagcgacaaacagccccgtaccgatagatccgccgatggcgatcatcgccagatggcgcgcctttaattcacggcgcagtgtctgcggttgttcacccgcgatttgatttgcttgctgagacattacaatcctgtttcatgtagttattttcatccactgagcgtgattgtagcgaaatcccgggactgtacccagcaaatatgcggcattataagatacctgcataatcgctgcggaattataagcacccggcttataatttgcctcagctgcccgccggaaaccggcggcagaagaaacagatgccgcgtcagcggcaataggtcaggaaggtattgagggcgttggagatatgtttctgacggtgataaatccggaaaagtgtgcggttgagggtaagcccggcaatcttcacctctgacaacagcccgttactcagctgttcggcaatcacccgccgcgacagacaactgaccccgcgcccgaagcgtaccgcgtgtttgacggcctcggaattccccagctccatttccacgcggaaacccggcagacggttaaagaggatctgatccagcacttcccgcgtacccgaaccgcgttcacgcagaacccaggccacatttttcagatcatcaggagtcacattgcttttctgactgagcggattatccgggctgcagaaaatcaccagctcatcttccagccacggctcggtaatcagttccggggaatggcagaccccttcgataagccccatatccgcgcggaactccagcacggctttaatcacttcctcagtattagcgataaataattcaaccggtgtattttcatgcactgcacggtatgcccccagcatttccggcagcatatagttgccgatggtggtactggccgcaaaacgcaatgcccccgcatcggttttaaacagctgttcaatttcaccggcctgctcgagcaaagcaatggctttcggatacagcagccgcccgtgctcattggtcaccagccgtttaccgacccggtcaaacagctgaacattcagctgattttccagatccgtcagagaggcactcacggcggactgtgaaagcgccagctgctgggaagcttgtgtcgtcgaaccggacttctgaacttctgtaaagacttcgagctgtctcagtgtgatgcgcatagcaaagcgctcccttattttatcccgattattatcatcatattaacattatacttataatttaacattgccattaccgctaacctgatttttaggttgattatagaattataatgaattttaaaaatattacgctttccgctatgctttgcacatcgttattcctttttgtgagttacttatgtctgaaagtcatatcaaaaccgaaaaagcccgctgcacagcaaaaccgatgtggctgagactacttccgggctttgtcctggcgggggttctgaccaccgccgctatgctgctcggggaaatgccctggtttatcaacctcgggctgggcgcactgacactggctattctgctggggattattgccggtaataccgtttacccgcatatcaagccacagtgcgaagccggggtggggtttgccaaacactattttttacgggcggggatcatcctgtacggcttccgtctgacatttcagcagattgccgatgtcgggatcagcggcgtgattattgatgccgtgatgctgaccagcaccttcctgatcgccatgtatatcggccgtaaatggttcgggctggacagagaaaccgtcattctgattggtgcaggcagcagtatctgtggtgcggcagcggtgatggccaccgagccggtggttaaagccccggcaagtaaagtggcggttgcggtctctaccgtggtgattttcggcaccatcggtatcttcctgtacccgtggctgttccatctcaatgccgcgctgggctggctgccgttcaccgacatgagtttcggggtgtatgccgggtcttccgtgcatgaagtggctcaggtggtggcgattggtcacaccatcagcccggatgcggaaaacagcgccgtgatcagtaaaatgatccgcgtgatgatgctggcgccgttccttctgatcctgtctcagtatctgagccgtcagaaaagcagtaccaggggcgcggcgaaggaaaaatccaaaatcactatcccgtggtttgccgtcttctttattctggtggccggatttaactccttccatctgatcccggaaattattgtccgccagattattgtgctcgataccattctgctggcgatggcaatggtggcactcggcctgaccactcacgtcagtgctatccgccaggccggtatcaagccgatgctgatggcgctggtgctgttcggctggctgattggcggcggtgcggcaattaacctgcttatcccgctgatcaccggttgatcctgcccttctttctgtgatatcccggttgtgcggccgggatatcctgtcactgcattctccggttccttatgccataatcggcacaaagaaggagaaaaaccaatgaaatatgtcggagcacacgtcagcgccgccggtggtgttgatcaggcagttatccgtgcgcatgaactgggcgccacagcctttgccctgttcaccaaaaatcagcgccagtggaaagctgcccccctgccggaaaacgtcatcgcggcctttaaggccaactgcaaaaaatacggctacggccacgggcagatcctgccccacgacagctatctgattaacctcggccatccggaaacggaagcactggaaaaatcccgcgaggcatttcttgatgaattgcagcgctgcgaacagctcgggatcgaccgtctgaatttccatcccggcagccacctcaataagattgaggaaaaggcttgtctggcgcggatcgcggaatccattaatattgcgctggataaaaccagcggtgtgattgccgtgattgaaaataccgccggacagggaagcaacctcgggttccgctttgagcaactggccgccattattgagggcgtggaggataaatcccgcgttggtgtctgtatcgatacctgccacgcgtttgccgccgggtatgatctgcggacaccggaaacctgcaaagccacgtttgcggattttgaaagcattgtcgggtttgagtatctgaagggcatgcacctgaatgatgcaaaaagtgaattcgccagccgtgttgaccgtcacgatagtctcggtcagggtaaaatcggcaatgcgccgtttgagtttattatgaaagataaacggttcgacggcatcccgatggtactggaaaccgtgaatccggatatctgggcgcaggaaattgcctggctgaaatcgctggaaaaataacccgggttataccaccgggctgagtttaatttttgccatcattgccgccagttcggcgcggtcacggacaccgacaccgggctggctcactgccagtgcagacaccgctgtcgccatccgcagcgtgtgttcgctgctctggctcatcagcaggccgtataccaggccgccgaccattgaatcccctgccccgacagtgctcaccacctcacaatgcggcggcagtgcacgccaggcaccggaggcattcacccacagcgccccttcctgtcccagcgaaatcaccacatgggcaatgcctttgtcccgcagggcatgggcggcgtcaatcacatccttcagttccggcagcggtttacccgcccagatctcaagttcatgacggttgggcttcaccagccacggtgtagctttcagacctgccaccagcgcctcacggctgctgtcaaaaataatgcacgggcacagctgacgcaggcggctcatccaggtggtaaaccacgccggatccacgccttccggcagactgccgctgaccaccaccatatcgaactgcccgagccaggtcagtgaatcggccataaacttctgccattcgctctcggtgatacggaaaccggaaaaattcagatccgtcaccgagccgctgttttcggtcagtttcacgttgatccgggtgcgtcccgggatcacatggaagcggtttgccagcccgttttcactgaaaaaatgctggaattcttcctgattatctttccccagaaagccgctgacagtcacatccaccccgagatctctcaggactttggcgacattaatgccttttcccgcaggatgtaaccctaccgttctgacacggttcacctcgcccgggacaagggacggacacattcccacaaggtcataggccggatttaaggtaattgtggctactcgacgggtcatcagccgggtgctccctctgttatttttggctaacgggttataatcattagtaatataatgcagcatgatacaatagctgcttttgaatcgtttcagttataacacagacaggcagatattctatgctctgaatcattcattttgcaggaagatattgtcaaaaacagacaggctgtcactccggcgcacggaagtgtaccatagcgcccgcaatctgattaaaaagaaggaaaaaataatgtcagtcgtcgttggtaccggggtggttattgtcaacagcaaaggtgaagtgctgctgggtaaacgcagcggcaaacatgcgccatactggtccattttcgggggacatgttgatcccggtgaaacctttgaagcctgcgctatccgtgaaattcaggaagagatcggcattacccttactgacccgaaggttatcggtctgtgcaataacctggaaacataccgggcggaaggcaagcacacggtatcagtctgcctgctggcacactatgacagcgatacgctgccggtgatccgggagccggataaatttgacggcattatctggtgctctccggataatctgcccgaaccgcattttgaagccagccgcaacgccattcatctgtggcagaccaatcagttttatctgacaaaataatccgttacatgccgcacctgactaccggggcggtaattgctcatttatcattcaatcacacacaattacgcggatttatcagtttatctgctttacaacctttttttgccgccgtatcatcaagctagtacacggagctgagtaaccggaggatttatttaatgagcagcgacgcaataacacaaaccaaacgcccttccgtcctgggcggtgccatgattatcgccggtaccgctgtcggtgcaggcatgttttccatccctgtgatgacagcgggtgtctggtttaccggctccgttctgctgctgatttacacctggttttgtatgtatacctccgggctgatgatcctcgaggcaaacctcaattatccgtcaggctccagctttcacaccattaccaaagatctgctgggtaacggctggtcagtaattaacgggctctccatcgcctttgtgctctatattctgacttatgcatatatctcggccggtggttcgatgttacaggagaacctggcagcacgcggactcaatatcaccccggcgatgagcgggattttctttgctgccgtggtggccgtgattgtctggatttccaccaaagccgttgaccgtctgtgcaccattttaatcggcgggatggtgattgcatttgtgatgtccgcaggcggcatgatcacggaagtgaaaaccgcggtattatttaacacacaggacccggaagcccgctatctgccgtatgcactggtagcgctgccgttcctgctgacctcattcggcttccacggtaacgtgccgggtctggtgaaatattaccgtaatgacgcgaaatccgtcgtgcgcagtctgcttatcggctccctgatttcactggtgatctatatcttatggcagctggccgcccagggtaacgtcccgcgtgaaaactttaagcaggttatcgcggaaggcggcaatatcaccgcgctgttaagccagatgaaagccgctatcaacagtgacactacggtgcagttactcaatgccttcagttatatggcgctggccagctccttcctcggggtgtcgctgggactgtttgactacatcgctgacttctttaagtttaaggataacggcaccggacgcctgaaatccgccgtgtttacctttgttccgccggcgattctggcagtgctgtacccggacgggttcctgtatgccatcggttatgccgggctggcagcaaccatctgggcggtgattgtcccggcgctgatggcaaaagccacccgccgccgcttcccgcaggcagcctaccgtgtgccgggcggcaatgcgatgatcatctttatcattctgttcgggcttctcaacgccgtcacacatattttatccatgatggatctcctgccggtttaccgctgatttcacccggatatcacacccgctgcatttctgcaggcgggtgtgataatttgggcttgcacattggaaaaactgcgagtaattttgtcgccaatcggcaggctttaaggcctgctttactattgatgttcattatgtaacgggacaaattatggcaaaagccaatgaaattaaacgcggaaccgcagtgagctataacggcaagctgctgatggtcaaagatatcgatgtccagacgccaagtgcccgcggggccagcaccctgtataaaatgcgttttactgatgtccgtaccggtcagaaagtggaagagcgttttaaaggcgatgatattattgagaccattaccttaacccgccgcgctgttcagctctcttatgttgatggtgatgagtatgtctttatggatgatgaagacttcacgccgtatccgatgaaaaaagatcagatcgaagaagaactgctgtttattcccgaggaaggtctgccgggtatgcaggtactgacaatggatggccaggtgctggcgctggagttaccgcagactgtcgatatggaaatcgttgaaaccaccccgggcatcaagggtgcatccgccagtgcacggaccaaaccggcaaccatgccgaccgggctggtgattcaggtgcctgaatacctgagtaacggtgaaaaaatccgcattcatatcgcggaacgccgttatatgggccgcgcggattaattcccgcagccggtaaaaactgcctgttaccgggttaccggttttctgcacattgcggagaccggctgacccgccgttcttttcccgtccttcagaaataatccacccgcagatacgcttcccggcgctcttcattcagcaccgtgtaagacgtacgccccattgactgcggcagacgcccctgcacaagttcaccttcagcgatactgtcctgcacactggcaggctctccgttgcgcaggcagcgatattcaaatgacggctgactgttctgcggctgttccgccgccgggacactgacctcacaggcggcattcaccacactgccggacagcagaatcgtcccttcactgacaccggctgccgcacccggtgtgataactgacaagcttaacaacataccactgaaaatagccttaagatgattcatcacaggcacctcactgttgtttcgtcagactgacgaccagcgtgttaacgttaccgctgtatctgttataacgcgccggacacaaaaaaagaagaggaaacagatatcgtggtgtgatacgtcacacgatttttccggtttcctctgaatgcattaattgtgattctcagtctgcattaaagataactgacaataaccatcgctatcagcttactgtcatccatccagtgaagttttgcatcacccatattggccggtatcaaatcagaaactgaccgggtattacgggtaatagtctgggtattcagccgctcttttttcatcccggagcggtaacagcgggaactgatgtcattggtctgaaagtccattgcacaggggccttcaacaatcgcaccatgaaaaatgatcacacccgatgctgtctggcctttactttcagttgccggagcaaaactgctcattaataagcctgcagcagcgataaagaactgtagctttttcataacgtacctcttcagataagtattcacggaggcaatccgttaccgccgggatgaaaaatattcgcttattccttatcgacaataggtcactaatctttactgcgctataacaaacagccgtatttttagtacaccttcagcgttataatctgaaattccttattttatgatatgcattcggctttattaactacatcactctcttcacttatgattatagacgccaccacgaaaccaacaacttttacataaaaataacatgcgttatttccctttttctgtataaacccttatccgtatttctgtcagactatccggaactatttccgtaataatattttattatcatcaggttttgtcatggcagtacaacgcatcacacttccgctttttatcagcctcgccggtatcatgctgtttctttcctggtacctgccggttgatcacggctggtgggcgctacctgaccatgctgttttccgttttttcaataccccgctcgccggtaatcattcactggctgtatttattgcggttattaacaaccgggcatttgatctggcagcactcctgctgatgggacttatctattatgcggctttccgcaaacaggacagcgacggtaaacgccgtctggtaatggcaggtgtggtgatggtaataagtgcggtactgattaatcaggccggacaggcaattccttttaaccgcctcagcccgacactggaactggacgctgttcaccgtgtcagcgatatcaccgggatctttacaaaagatgcctcaaaaagcagttttccgggcgaccacgggctgatgctgatcatttttgccgcctttgtctggcgttatgccggattccgttattttgcggcagcagttttgctgacaattatattttctttaccgcggataatggccggtgcacactggttcagcgatattatggccggttcgctgtcactggcactgatcacggttccctggattttactgacaccgctgagtgatcagtgtgtaaattttctggtacgccatatgccccgtttatccgatattacaaagaaaatttcacattagttaaacatatttgacatcacatcctgattgtttcgctgacaaatttaaggttttgtaaataacaggttttttccctcgccatttccggcacctttatgtagtatcaatccgtccgattattaggaattgattaatttcaccgataattacgcctttacggatgactgattaatttttcctcagtaattgttcatggatattaaacgtgccgttccgcacgtttttagaataaacatattgtgcacatacacagatttaattagtgttgatatgttttgttttttaaagtgacgtttgtcacataaggactgcaagggaaaactcacacatggtcacatctcaaccaattctgagatatatcacccggattgttccggcattgattatcgcggcgacattgtcagcatgcagtacatctccaaattcagcccgtcaagttcaatctgaaacccgtacaaacagctttatcttgcaagcgtctcaggatgaattcgaacagttagttaataatgttgatgttaaatccaaactgatgtctcagtatgccagctggaaaggcgttgcttaccgcctcggcggcaccacccgctccggtattgattgctccgcatttgtccgtcagactttccttgaccagttcggtatggaactgccgcgttcaaccgcagagcagcagtctgtcggcaccagcgtaaaacgcgctaaattacaggccggcgacctggtgttatttaaaaccggaaaacgtcagcgccatgtcggtatttatgtcggcaatgacaaatttgtccatgcatccacttcaaacggtgttatcgtctcaaacatgacggataaatactggaacaaccgttattacgacggacgccgtttaattaaataatacattcactcccttgcagtgtattatttaacaagaaaaagcttccttttcaggaagctttttttatgtctgcattttatcagaatccgtcacacagaacggcagtgttacctgtcagaacgggtaacgggcagaaatattctccgcaattgccgcccctgcggttttcagggcacacagtgcggtactttcatcatcactgtgtaaaaacaggcacggctccccttcccaggtcaggatcagactatcaatctgtaatccttccaggtgcgaccggatggcgcacagtgcatcgtatgttgaatggtggccgtgactcagtaattttaaaccggtcaggctgtcttccctgctctgcaaagattccggtaacgcctctaaccggcggccgtcatcattaccggcaagccggtaatgctgtggcaggcgggaaacaactgaaagcgcattactattcacactattatcctgtcttactgtgccggtgaatcatctgaaataaattttccgacccaatccttcggaattaacgaacattctgtgttcacggatgatgaaacgccggtgatttactcccgatccggtaataaaacacattgtgctctttcgccggatgttaacatcatcaatccaattacctctatttgtatactgttttgttaattttctcaactgatttattttatatcatatagcttaaattgaatgaagaaggatataattccgcgctgtaatgacccgcatacccgtaaatacgatgaaatatcagttaattatataattaagagaaaggcgtacgatattatacgttactttctgccgtgaaacagaattcacattagtgtaacttttcatgactcagatcaaccaaatgacgactgagtagttatccggagtaatcattcgactattactgatattcgggaaatgaccggcccggagacacccggaccggcaacagggaaaggaaatcaggcaaaacgccgtgcgtacagcaccagagaggcggcaatcagaatacatagcgccatcgcgccgaccatcggccaaaccgttgtcatgtcaaatgaagccaccaccgcaccgacacccgcaccgataccaaaccgcagcacaccggccagtgatgaggcggtaccggccatatgcggataatcatccagaatcaccgccatggcatttgatgtgatcatggcaatattccccacatagcaggccacacctatcatcagagccacaaagccgagatcggcggatgcggccagtaccagccagcatccggccagcaactgcaccaccagcccggtgcgcagcatattcagtgcaccgaaacggcggacataacggctgttaatggtggtcataataaacaggaaaacaatattcagcgcgaagcagtaaccgaattccagctccgtcagcccgtaaagctgaatgtaaacgaatgacccggccgataaaaacgaaaacatcccggcaaatgaaaagccggatgccaccatataacacagtacccgcttctggcggaacagtgtaacaaactggccgagcatgatccgcagccggaacggctgacgccgctctttcggcagggtttcgcggataaagaacagcaccagcagtgcagcgatcagcgcggcaatcatgatggtccagaaaatcgcgtgccagctgaaccagagcatcatcataccgcccatgatcggtgccagcagcggtgccactgtcattaccagcaccacaaacgacatactgcgggagaattcatctttggtgaacatatcgcgcatcagggcgttgatcaccacacttgccgcagccgctgcaaagccgtgcagcccgcgcatcccgataaaggtaccgatatcctgagacatcgcacacccggcggaggccagggcgaaaatcagtgttcccccgaggatcaccggcttgcggccgagcgcatccgccatcggaccgtataccagttgcccggcggcgaaaccgatcaggtaactgttgagtgtcatctggacatcgccctcagtgacaccaaagtcacgggcgatggtcggcatgcttggcagatacatatcgatagccagaggcatcagcatcgataacagccccaggataaaaatcaggccgaaataggccgaacgttgcacttgcacgcctgttactccgtattggattcagtaaaaaaggtgttcagagaaccgactgaatttcctcatcagtcagcgggcggtattcccccggcgccaggctgtcatccagcacaatgccgccgatacgctcgcggtgcagttcgtccacatggttaccggcagcggcaaacatacgtttgacctggtgatagcgcccttcggaaatcgtcagccgcacatcctgcggggtgataatctcgagttttgccggtttggtcgggtgctgttcgccgttaagtaacacaccctgctcaaacagcgctgcggtagtgtccgccaccggctccgccagggtgacgcggtaggttttctcgcaatgatgtttcggtgaggtgatgcggtgcgaccactgcccgtcgtcagtcatcagcacaagcccggtggtatcaatatccagccgtccggcggcatgcagtttatgggcaaccggctcatcgataaaataaagaatagtcgggttaaccggatcatccgttgagcagacatagccctgcggtttattcagcataaagtagcgcggcccggtgacgtgtgtcatcacattgccgtcatacgccacttcgttctccgcgctgactttcagtgcgccgtttttcacgacctcaccatccacagtcaccatccccgcacgcagctctctggccacaaggttccggctgatacccatctgatgggcaagaaatttatctaatcgcatgaatgtctcttaaacctgacgtgcccgcagcatactgccggctgataagcagataaaatgaaagaattttgtttgataataaccacagtaatcattataacaacaaaccgtcaacatcacagcgcctttctgacggcgcttccgctatttatccgccgtcatgcagtcaattgtcgcgcccaaagtgtgatatgctgacgccctgattttgtctgttccgccggagtttctgtgacgtttaccctgcgcccttatcagcaggaggctgttgatgccaccctgctctatttccgcaaacataccacgcctgcagtgattgttctgcctaccggggcgggaaaaagcctggtgatcgccgaactggcgcggctggcacacggccgtgtgctggtgctggcgcatgtcaaagagctggtagagcagaatcacagtaaatatcaggcttacgggttagatgccggtatctattccgccggattatcgcaaaaagagtcttcacaaaaagtcattttcggcagcgtgcagtctgtcgcccgtaatacggcggactttgacggcaaattttccctgctgattattgatgagtgccatcgtatcagcctcagcgaagacagtcagtatcagcaggtgatacagcatctgcagaaaaataacccggccctgcgcattctcggcctgacagccacgccgtaccggctgggcagcggctggatctatcagtatcactatcatggcatgatccgcggcgatcatgaatgcttcttccgcgattgtatctatgaactgccgctgcgttatatggtcagccatcagtatctggtgccgccgcagcggctggatatgccggtgctgcaatatgatttctcacaggtaccggtcagcgccgccgggatgtttgacacgcaggtgctggcgcgggaagtgaaaaaacaaaagcggatcacaccgcgtattgtccgccagattattgagtatgccgccccccgtcagggctgcatgatatttgccgccacggtggaacacgcggctgaaattgtatcactgctgccgccgggcgaagcggcactggtcagtgcggataccccgtccgcagagcgggaaacgattatccggaatttcaaggcgcgggagctgcattatctggtcaacgtttccgtgctcaccaccgggtttgatgccccgcatgtggatgtgattgccattctgcgcccgacagagtcagtcagcctctaccagcaaatcgccggccgcgggctgcgcctgtctcccggaaaaacggagtgtctgatcctcgattacgccggaaacccgcatgacctttatatgccggaagtcggcaatcacaaaccgaacagcaaaagccagccggtgcaggtattctgcccgttgtgcggctttgctaatctgttctggggattatgtaccgacgacgggcatatcatcgagcactatggccgccgctgtcagggaattattgatgcggatgatgaatccgcccgtcatcagtgcgatttccgtttccgctttaaactctgcccgtcctgtaacggggaaaatgatattgccgcacggcgctgctgccactgtgatgaaatcctcagtgacccggacgacatgctgaaagccgcactgcgcctgaaagatgccctggtgctgcgctgcggcggtatggcgctttctgccggacaggataaccgcggtgaatggctgaccataaactattacgatgaagacggcaccactgtcagcgaacgtttccgcctgaccaccccggcacagcgttttgtctttgaaaaacagtttctggcacagcatctgcgcgcacccggtgtgccctttcagtggcaggatgcagaatccgtgatccgtcagcaggtactgctccgttacccggattttgttgtctcacgcaaaaaagagaactactggcaaatccgcgaaaaaatctttgattatcaggggcgattccgcaaatctgacagtctggcataaccctgagtgctgcttttttggttttataccgggtttcgtttgccgtttgtccgcattttcggtaaaatgcacgccgcttcaccacgggtaaccctgctgaagccaaataccgactttgctgctgggtcgcctgtagcaaagattttttttactcttgttaaagagaaaagttatgttaactatcaatgctgaattacgtaaagagcagggtaagggtgcgagccgccgcctgcgtcgcgcaaataagttccctgctatcgtttatggtggcaaccaggaacctgtttccatcgaactggaccacgacgtcctgatcaaccaggaagctaaaccagaattttacgaagttctgaacctggttatcgatggtaaagaaaccaaagtgaaagtacaggctgtacagcgtcatccgttcaagccaaaactgacacacatcgatttcctgcgcgcttaattacgccacctatcgagctttaatcgggacgccgagtaaataacgccgcttttgcggcgttatttatttctgctctcactatcctttattaccacggcgctgtaactgatcccgcagattcggcggtgtcccttttatcgtcagggtatccgtggccgcatcccagaaaatccgctcccccagtaacatcgcatcaaaattaatggtcagcccgccgccgctgccggcaaattttgtcagctgacgtaatgtgctgcggtccgccgggaaagaatcctccagtccgtactctttttcctgagtaaactgcgcaaagctctgctcacccagcggcggcagttccgcagacagctctgtcagctgaatctcttcaccgctctgtaattgctctgtgcagtaatcaaacacctgtttgcggtaagactggcgctcctgtttgtccgcctgagcctcctcgcagtaatcgtccagtgcctgtaacaggcctttgttctggattttggcattaaagccttcagcggcaccgaggaaatccataaagaaatcggagactttgcgaccgacacggcctttgaggaaggtcaggtaacggctggattccggattggtttcccattcggtcaggtcaatacgggcgataatatccgcatgcggaatatccagataatgggtgctgttaagctccaggctctcgttgaccagcatgctctggcagctgtcgagtaccgccaccagcagatactccaccgccagatagcggtaatgggcaaataacaccacaccgccctgggcaaacgggtattttgccagctcatccttcaggcggacggttgccgcacgggtgaaggcgtgaaactcttcctcgccctgccgctgcagacgcagtgcctctgacagttcactctcttcattaaacacaccgtacgctttgcttttcgcgctgtagacccggtgcagttcagccatcatttcctcaacaatggcggttttttccagtggtgtgtcccgcagcactacttccagtgtctgttcgtcgcgtttaatcaattgatgcaacgcaatctgaatgatatccagactcatcttttactccttcggcctcgtttgcgcgtattcaaacaccgttgtaatctgtgcgcaagtcacaatcacaggagaatgtgacaagacaggataatcagcggcgtgcatactgaaaatggcgtattccctgcgtaaccggatccataattgaaataattttccgcaaaaagcagaaatacggccgctcatcagttatgatatagagctttgtacaatcaggatatctacgtttatgccgcaatcatcccgctacagtgatgaacacgttgaaaagttactggctgagctggtcagtgtgctggaaaaaaaccggacaccgaccgacctttctcttatggtgttaggaaatatggtgaccaatctcatcaataccagtgtagcgccgtcacaacgcgctcatattgctgaatccttcgcccgcgccctgcaatcttccgtcagtgaagataaagcgcactgaccgcattccggctgacgacgaaattctatggtaacgtatcgtccgaaatacggtgacaaagtttcccagatgattagctggggacactggttcaccctgtttaatatcctgctgagtcttgcactcagcagccgttacctgtttatttctgactggccggacacgctgattggccgcatttacgccatcaccagctggctgggacatttcagtttcctggcattcgccctctatctgctgattgtgttcccgctcacctttgtggtgatgtcacaacggcttctgcgctttttatccgctgccctcggtacggccgggctgacactgctgctgtttgatatcggcatctatgaacagttccgcctgcatttaaatccggtggtgtgggatttagtcgtgaaccctgaacagggggaaatggcgcggcgctggcagtttatctttattgcgatcccggttatcttcctgatcgaaatgctgttcggcacctggagctggcaaaaactgcgcagcctgaaccggcaaaaattcggtaaacctgttgcggtggtatttatcaccgcctttattacctctcatattatgtatatctgggcggatgccaatttctaccgcccggtgacgatgcagcgctataacctgccggtctcttacccgatgaccgcccgcaaattcctggagcgtcacggcctgctcgacagcaccagttatgagcagcaactgcttctgcacggcgacccgaccgcccagggtgttgagtacccgatcaacaaactgacctatgcagacaatggcagcggctacaatttgctgcttatcaccctcacctcactgagccgggaagatattgataaggcaatgccgaacctgaaccggtttgcagaggaaagcacgcaattcacacagcactacagcagtgaaattaatccggaacgggcacagttcgggctctattacggcatctcaggtacctattatgacggtattctcaacggacgcattccgtccgcactgatgacggcgctgagtgcacagaattatcagtcagggttcttctccacagaacactttgcctccccgctcttccgctatgccctgctggcggattacagcctgccgccgctgcgtgacggacaggacaataacagaacagctaccgcctctgcggatgtggcagatcgctggtcactctggctgaaacagacccgcaaagatcagccgtggtttgcactaattaacctcagcacaccattaccggatgatcattccgccccggatatgacagatattgataacacgctgggcacactgattcaggatatccgtgcgcgcggtgagtgggataaaacagtgattgtcatcaccgccggtgctggtcacagcatgaccaaattacaggataactgggtcaccgacggcaaatttaaccgcgaccagttacgcgtgccgttgattattcactggccggataccccggcacaaaccatcagcaaactgaccgcacatccggatattatggctaccctgatgcagagactgctgcacgtcagcaatccgccgggagaatacactcagggtgatgatctgttcactaccacgcggcgtaaacctcggatattcaccggcgataacagcaatctggtcattatcaagccggattccgcatcactgctgaccgctcagggtaaataccagcgctttgatgagaataatgagaagatccgcaacgccaagccggatatggcggaattactccaggttctgacagagcagaaacgctttatcgatacccactgagcccgggataaaaaaagcgcaactgatacagtagcgtcttgctttaaccaaacaaaacagtagtatagataacattcggcatgtagcgcagcctggtagcgcaccgtcatggggtgtcgggggtcgcaggttcaaatcctgtcatgccgaccattgtttatataagaaaaccaactcgttagggttggtttttttgtgcctgtaatccacaagccatcacaccttaagcattttcaccgtttcatcgatatcgatttcatcttctgagaaaatcagggtagtgccgtgctgtgtggtgatcgccagttttctgagtgtgcgcatttcggccggaccggcggattttggtttgatgttgttcatcagcacgccgacagacagtaccgcgttctctttatcaatcccggtatctgccgcttcttcctcactgtaaaccacgaaggacttaatggccgtcagcttaatacgctcaccggcgataaaaacatatttgctttccggcactacttttaccgcataggctgacaaccctttattattggtgccgggctcaaatgtcacggcggcatttttcttaatcaggtcaggattggcgaccttaaccacatgaaaataacggttatccccgttctcatctttgataaacccaaaacctttatcttcaaaccatgttgtgattgttccgttcatcgccgttaccacctgcttaatcatctgttgctgagtcattacagcgcgcagtataaaggacaatgcccgcgcagaccacgcctttggctgagatccggcgtaatcttcaggcatcctcttacctgacaaccgaaattccggctaaataatagccggacaccataatttactgttatcatcaaaatatgattagatattaatattattaactaactatattccggtaatcgagatgtcctgcaaacgtaaaattccgctcggagaaaacgtgctggatgcagcacaaaagcggattgaatggctgtttgatacttttgaacaaatcaccctttccttttccggcggcaaagactccaccgttctttttcatctggttgcagcagaggccagaagacggcaccggaaattcaatgtcatgtttctcgactgggaagtacagtattccgctactatcagccatgttgctgccatgaaatcgctctatgctgactgtactcagcggttttactggatagcgctgcctgtcaccaccgaaagtggtatttcccagtatgaaccggcctggacggcctgggaacccggtaaaaaatgggtccggcaaccaccggaagatgccattactgaccctgatttctttcccttctatcatccggggattatttttgaagattttactcccgcatttaatcagtggatcaccggagatcatcacagctctgtcatactgctggggatccgcgccgatgaatcattaaaccggtttctcgccatcagtaataaccggaaactgcgttatgccgatgatatcccgtggacaaccgcatcaccggaaggattctattatatgggttacccgatttatgactggcatgtgaaagatatctggacttatatttcccgcagcagacttccttacaatacgatttatgatctgatgcatcaggccggtgtcagtctcagtaaaatgcggatctgtgaacccttcggcccggaacagcgcagagggttgtggctgtatcatgtcctggagccggaaacatggagccttgcctgtgcgcgggtcagtggtgcggatgccggtatgttgtacacacgacccggaaataaagccggttttttcggttcccgccaaatcagcaagcctgccggtcatacctggaaatcctacgcccgttttttactggccagcctgccggaaaaaaccgcagaacactaccggaacaaaattgcggtctatctgcactggtatgcagagcgggattatccggacgggatcccggatgaacaatccggtgatacaggcagtaaagatattccgtcctggcggcggatctgcaaaacccttttacgtaatgatttctggtgccgctcactggcattcagcccgaccaaatctcattgctacgacaagtattgcaggcgcatacaggcaaaacgcaaagactggcaactgatatagcagacggataacataaatatgaaaacagtactctctttactggaaaactatctgaacggactggataatgaagaacaaacaattgaggcactcaaccggataaaactttttttacatcagcgcagtccgtttaaagatgaaccggtcgattgtgtgctgtgggtaaagcgggcacaggtgaccgcaaatgattataatccgaacgtgatgtcaccctcggagaaaaaattgctggaaacgtctctgaccaaagacggttatacccagccggttgttgtgctgccatctccgcacgaccgctcagacttgcaggtggttgatggctatcatcgttatttattaagccggaaaaatgcactgaaaaaacgacttaacggatacctgccggtaacgctgctcgatacggaaaatcacggagttgctgaacagatggccgttactatccgccataaccgggcccgcggacagcatcaggttaccgcgatgtcagatattgtccgggacttatcacgactgggctggagcgatgaaagaatcggagaggaactgggaatgtcgccggatgaagtattacggcttaagcaaatcagcggtctggctgaactattttctgagcgggaattttctgaagcctggacagtaaaataaatcattccgctgttatccggtccggatgcggtttaccgggatatctgcggataaaaaaacagattatggcaatatagttaccccctgctgacggagatcattttgctgagatattccctgcttttgcttttaataacgatgtctgccgcacaggcaaaaattgatattacagctatcggacagtgtaaatacagcgggcagttaacccctgaagatattgccggacagcccggcgacggtgaaattcatcttatttaccggacagacaccacgggaagagcctatccggtaaaaataaccaaaaatacagaaaacacactgacaaatttgcgccccgtaatctgatggtttaatatttatctgcatcacccgggtgccgtccgaaaaatagttatgctgtaaccccgacgggaacgccagttgccataaccgcatgatggccgagtcctgacaatatttccctgtcagaatgccctgcattttatttaccgatttttcttctctgaataattccggcggcagaccagtaacctgataattcaggataatcacgttatctttccgggtgacttctgtcagaacggtgaaaggatcaacccggtgcggcagcagctgactctcatttttaatgatcatcgcctgaagtgtgtcgtactcttccggtgattttgtccctgtcaaaaatacatatcaaataacattttggtgctgatcccggcagagaccagaataatcatcggttttatgactttcagcccggagctcagtaccacaccggcccccagccgcgccccgatagcttgtccggcaaacatcagtaatcccagcgaccacatcattttaccgcctgcgataaaaaagataacggacgaggtattggaggccaggttcaggaaattggagtgaatttgtgctttatctatccggtatcctaacagcagcatataactgatggtataaaatgtcccggcaccggcacctaagaatccgtcataaaacccgacaccgccgccgcagataaatgaaaacaggaaaaaagaaacacgctgtttttctttggatttagtgatatcgggtgcaaaaataaagtacagcgtgacactgataattaatcccggcagtaattttttcagaaaagtcggatcaataaactgcacaaaaatcgtgccggatgcggcaccgaagaatgtcgcaataaatacccatttattattctttaaatcaatccgcccctgacgcaagaaataaataccggatgttaatgaactgcccagtgcctgcatcttatttgttgccagtgcgttagcaggcggtaacccggaaatcagcagtgcggtaatcgacagaaaaccaccaccgcctgacaccacgttgataaatccggcggccacggcgacaaaaaacatgacaataagaaatgttatgctcatggaaagacactttaaatggcagggatattcagtatataaaaagcacgtatccgaaaaagtgatgccgcccctgctgccggatatttggtataataaaatgtcatctttctgaacaggatactggtatgttgcgctatggtattcgcattactcatattttccggcacgcctttcactcgcgtccgcgttttattatctctctgatggtcgcgtttgtgactttttttgctctgctgcccgtacagagtgcactgatgtgcctgatcctcagctggaatgccttctcctgggtgtatttgctgtttctttttgagcggatcattaataagaaagtaaaagatatccgtaaactgactaaaattgaggatgaaagcgcccgcatggtgatgtttttcctgctggccgggtgttgtgtcagtttactggtgctcttttttgccctcggcgggcacggtaatctgacaggtaatgataaagctttccaatatattctgaccgcatccacattagtgtcttcctggctgttattaccggccggatttaccatgcactatgcgcacctttattacaccaacccgcaacaggaaaaaccgtggttattatttccggacagaccggctgaacccacttactctgattttatgtatttctcatttacgattgccgtcgcctcacagactgccgatgtcgaaatcgcatcctccccgatgcgccgcgcggtattaatgcaatccgtcgtctcttttgtttttaatatggcgatactgggattatgtattaatatctccgccggtttattttaaacggagtggcggatggaaacattactgacacactggattacagaatacggctattgggcaacctttttcggtaccatgatcgaaggggaaaccgctgcatttttgtccggcattgctgcacaccatcagttattatcctatccgaaagtgatgctggtggccgcactgggcggaattatcagtgacaatgttctgttttttaccggttattttgccggaaaccggatccttccccgcattcataaacatgcggataaaatagcccgtctgcaacggataattcaccgccgtgaaagcctgattattatcggaatacgtttcgcttacggattaaggactatcggccccgttattatcggcgccgccggtattaatccgctgaaattttttgtgctgaatattctcggcggagcactatggggaagcgttattgtctctgcggggtattttatcagcgcggcaatccttgccctgccgctgcatacttaccttgcctggttccttatcctcgcggcggttgccggtctgtttgtgctgataagaaagcataaattcacgctgtaaactgcggaacaaacccgcccgtcagccactattccggcttgcgggcgctgagcagaaagatcatcggccgttctttttcttcatccagtgccgggttggcggcaatctgtgccgctgacggtccccactcattcatggcggtgatttcaaaaccggctgtaatcagtgcatttatccaggtggataatttccggtgctgcttttccacaccgtcggcaaaccagttgctgatcctgacgccttcctgctgatactgattgaccggccaggctttattacctgcactatccgtacaccagttctgaatgacgggagctgtgtagatcgggtgttctgcggaaaaaatcagactgccgcccgcgaccagcgcctgaaacagcgtggcaaacagtgccgggatatcacgcagataatgcagtgccagtgagctgtaaatcacatcactttgtgccgccggtaattgcagtgtctcgagatcagcacgcagccaagtaatatccggatccgtggtcatcgatgcggctttcgccagcattttctctgacagatcaaaaccggtcacccgggcagcgccctgctcttttgcccagcggcagaaccagccatacccgcaccccaggtcgatcactgacttcccggccagtgacggcagcaatgtctgcatggcagtccactccggcgcgccgtccagtccttctgctgagcggggcagcgtggcataaccggcaaagaaatcaggattatcataaatattctgagacataacttactccttaaataacgagcaaattatattcatagtttgccggtttccgccacgattctgttctgcaggcataaaaaaacctcaccagagtgaggtttttaaaatctgttactgacagcggtgattacagagcaaccacgttagctgcagccgggcctttcataccattttcgatggtgaaagaaacctgctggccttctgccagagatttgaagctgtcgctctggattgcagagaagtgaacgaacacgtctttgctgccgtcagcaggagtgataaagccaaaacctttatcatcgttaaaccattttacagtaccggtaattgttgcggacatatgaatttcctttaaattgattttgttgccataaggcatataagcggtttgattacgtttttacttatgggaactatcagaaggaattcgctatgaagtggtatcttggataacgcttgacggagaacaacttaaaatcggactgacataaataggtctgtacttccaaaccaatgccaatattaagccatatattttgttatccggcaagctctttttgattcacctcaaactaccacaccggcaaatggtatcagtttgccagccccatatagccgtggatccccatataaagcccgaccagcgctatcagcgccgccgaaaagtacggtgcttttttggcaatatcacccagcccctgccagcggcggctgacctggcgcaaccccaccgcggttaccacaccgactgtgaccagtgtcagtgccaacccgatactgaaactgagcaccatggttgcccccagggtaaaagctttcagctgcagacagataagcaaaacagtaatcgcagccggacacggaattaacccgccggtcaggccgaacagtaacacctggctgttggtggctttgccgccggtaaaccgggttttgatttcatgcgcatgtgctctggcatgcgcatcctgatattcgtcatcatggtggtcatggtgatcatggtgatgctctgcatgatggtgatggtgatgatgatcgtggtcatgttcatggctgtgatgatgatcatgctcatgatgatggtcactgtgtgtatggctttcctgctgcatttctgtcagccagtttttttcaccgcggtatgtccgcataaacatccagaacgcggttgccagaataatcaccgccgacaccatttgtaaccacggctctacggcttccggcgtgaaccgggtactgatatacatccccccgagggcaatcagccagactatcagagtatgcgacaacgtcgccgccagtcccagcattactgcctgtctgaccgtccctttcaccgcaataataaaagccgccatcatggtttttgagtgacccggctccaggccgtgcagcgcacccagtgcaatcgcgcccgggataaaaaaccaggcatttccctgctgcagtaaagaggcaaaatcggtcatgacgtgtgatccctgttttcagaatgaagaaagcgtgaattgagtatactcccccccagtataattacactacctctttgtatcacgaagatgctactattttgcccgtcactttcttttcaccttatttcacggggttgccatgtcacataccatcagggacagacagaaacttcagaaccgcgccagtaaaattcaggggcaggtcaactcactgaaaaaaatgctcgatgaaccgcatgagtgctccgccgtactgcaacagattgcggctatccggggcgcggtaaacggattaatgcgggaagtgattaaaggccacctgattgaacacgtagttcatgaggaagatgaggaaaaacgtcagggtgatctggatattgtcctgaaggtgctggattcttatattaagtaaagaaaaattaagccggtgttgtaaaaatctccgacgccggtcctgtaagtgttgaatatccttttctgatataaaaatattccccctgtatatctcagaaactcactgagcccccttttattcagctcctgcaacagagactgaaaataaagaatgctgttaataatcagttaatttacagcgtctgaaataatctatgataaaacgatattttcttttatttcactactgaaaaggctgttatgactataaaacggattaatccgccctcactgtttaattccctgcaatacggtttcagtcaggtcgtggaaacaaccggcacccggcagttatttctgtcaggacaggtcggcgttgatcataatgaagtgacaatcgcaggcggtatgcgggaacaagccgcacaatcggtgaacaatattgcccgtgccctcgcggcagccggcggttctctgtctgatgtggttatgctgcggatttatatccgtgccggtgcggattcacacgatgaacaaatggcaattgcggatgtgctgaaagaaaaatttgcagataatgcccccgcctcatcatggattattgtcagcggattatcgctgcccgaatggctgattgaaatcgaagctcacgccgtgctgccgtaaccggaaggcgctgtacagcgcctgatttgcatgatattgattacgtgaatattaaaaaataaaataaaaatactgagaatgtcaccatgcaagccgccacccgttccaccattgcactgctcgcttcctcattcttaattactatcggacggggtgccactatcccgtttatggcgatttatctcagccgtcagtatgacatggcggtggatcaggtcggggtggcactgacggtcgcactgacaaccggcgtgttattcagcctcggcttcggcatcattgcggataaatttgataaaaaacgctacatgctgatggcaattctggtttatatcgccggatttatcgctattccgctgactcataatatcgcgctcgtcgttgtcttcttttcactcattaactgcgcctactccgtttttgctacggtgctgaaagcctatttcgccgatacactgccaccggcgcgcaaaaccaaagtcttttccctgaactataccttcgtcaatatgggctggactgtcgggccgccgattggtaccggcctgctgatgtacagcgcggatctgccgttctggctggcggcctgcaccgcctcattcccgatattctttattcagcgttttgtccgcagcgtgccgccttctgcctccggcagcaacagtaccacctggcagccttctgtcatgctgcatgataaagccctgctctggttcacattatccgcctttctgggatcgctggtgtttggttcgttttccgcctgtatttcccagtatgtcctgacggtggcagataccacactggcagaaaaagtgattggtgtggtactgccggtcaatgctgcagtagtggtttcactgcaatatatggtcggccgccggataagcacagacaatctgcaaaagctgatgactctcggtacactcttttttatggccggactggccggatttatgatgtcaggcagcaaccttgtgttctggggaattgctgcatttgtctttaccctcggtgaactgatttatgcgccgggtgaatatatgctgatcgacaacattgcgccggacggcatgaaatccagctacttttccgctcaatccctcggctggctcggcggtgcctttaacccgctgatgaccggcggtgtgctgacctatttcccgccaaataccctgtggctgctgctgattggtgtttccgcctgcgcctggctgtgtatgatgcgcggcctgaagatcagcagaaacaggctcattcatcagtgaatatttgattcacttatcattaattaataatacttcatattccgatacggtaattttctgctgctgagctatcctccctctattgtttagttttatttaacatagagagtgctgtatgccgcatcaggcactctgaccagccctgttattcatgtcagaaaggagttaccgctatgtcttatactgaaccggatttgatgagtccggcggaagagcaatctgtcatccgtatcctgaatgtgactctcgggctggcgctgcccggttgtctgcgggttgcggcagagctgaatattgccgaccatctggctgacgggccgctctctgttaccgcactggcagaacgcaccggctcggatccggataacctgcgccgcattctgcggatgctggcactgaacggtattttcaccggtacggatgatgacagttaccggctctctcctgatgcggagtttctccgccgtgatcacccctgctcacagcgggatgccgttctgacactgaccgataatacttactggtcaaccattggtcagcttaatgaatccgttcgcggtgaactgaactttaaaaagctgttcggtaaaaccttctacgaatatcaggccaccaaacccaaccgcaacgacagctataattttccgtccgggatgtccgccctgtcagagatggaaaactattttgtcacccgggcttataacttcccgtcatcgtgccatattgccgatatcggcggcggcgaaggctcactgctgctgcggattttgcgcagcgacccgacactgaccgccaccctgttcgacagcccgcatgtgatatcagacaaatacctgtctcagctgggtgacgattcccgctggtcgctggacggcggtgacttctttaaatccgtgccgcaggcggatatgtatctgctgaaaaaagtcatttttaatcaggatgatgccaacgccctcgctgtactgaaaaactgctgcaaggccatgaaaccggacagcaaactgctgatcatcgaatccattgtgcatccggaaaccaatccggcggcgcattacggtatgggcattctctgtatggcgatcctgcccggtggcggtgagcggactattccggagtttgaggctctgctggctgaagcaggactgaaaataaaccgccttatcccgactgaatgctatatctctgtgcttgaagtggttgcggcctgatctttgatccggcacagtgcgttcccggacgtactgtgccattgtaaaagtccttatgtcagcagcggagcaggaagcaccggtgagaatattactgattttgccgtttgacaggacttaccgctaccggaaaagcgcgttttccgtggcgatcagctatgccccgctgacccttatcaccctcgccgccctggttcccccgcatctgaatgccgaactgaccctttgtgatgaaggcgtttccccgccggtcactgccggggattttgatctggtggtgatcaccgccaccgcctcctcttccccccgcgcctatgcgctgtgccgctactggcgcgaacgcggggcaagaaccgcaatgggcggcgcacacgtcacactgcagccggatgaggcggcacaacacgccgataccgtcctcatcggtgccggtgaactcatctggccgcaatttttacaggatatggctgacggacatccgcaaccgcgttatcagcaccgccctgagcgcggctttctgccgatgccggtgccgcgccgtgatctgctgccgtcccgcgcctacatgaatatcgccactattattgccgaccgtggttgtccgcttgcctgtgaattctgttcggtgcagcatcagtggggacgcaaaggcacagcacggccagcggcagatgtgattaacgagataaaacagagcggcagacagcgctggatattcctcgaccctaatctgtacgccgaccggcagtacagtctggaactgttccgggcactgatcccgctgaaaatccgctggtcgggactggcgacactcaatgtgacggatgacgacgaggttttccgggcgatgtgtgacagcggctgcgaaggcctgcttatcgggctggaaaacctcagtcagcagaccatgacggccaccggcaagaattgtaaccaggtcagcgaataccgccgtcagatccggcggctgcgcgataaccggattgccgcactcggctgttttgtgctcgggtttgatgaagacaccccggagagcatccgcgatacgatacggcagatcccgtctctcgggctggatctggtacgtttttctgtcctcaccccactgccgggtacacggctgtggcagcggatggcggaaaacggccgcttaatcacacaggacctgagcctgtatgacaacgaacatgtggtttttcagccgcaaaatatgtcaccggaaaccctgcaatccttactgcacgaagcctggcgggaaacataccgtctgacggccattctgcgccgggtattgcaccgtccgggcagccgttttatccgcctggcggccaatctcggcttccggctgtacgcccgccggttacgccatgaaaaaaccgggctgttcaacccggcaatagtgacgaataacacaaggaaaacagactgatgcgtcttttactcaacagtattctgctgattttttcgatgactgcggcagcgtcctgtttatggggagtgagccatctcgcctggtattatgcactgcctgccctgatcggttttatgctgattaacaatatgccgttcgctattctgcatgaagcggtacatggtgtggccgcccgcactgccgccggtaatcgcgccatcgggattattgccgcgtgggcgtttccgacttcttttaccctgcagcgccgtgcgcatctgaatcaccataaaaataaccggacagataaagagctgtatgattattacctgccaaaccagccgcgctggctgcgcaatatctggatgtacggcggcaatctgctcggcctgtactatttttgcgtactgctgggcaatcttctctggtttattgctccgggcgtgtaccgttcacgggtgtttgtcaccaaaatcgccccggcactggggttcgggtcacaggtgccggaactggcaaaactgccgccgctgaccatctggagtgaactgctcggtgcatttctctggcaggcactgctgttttgggcgctggacttaagtgcggccggttatctgctctgcctgtgggcttttgcgctgcactggtcggccctgcaatatgcggatcacgcctggagccgccgcgatgtgatgaacggtgcgtggaacctgaaagtactgccgatctcccgctggctggcgctgaattatcactgccatctcgcgcaccaccagcacccgcaggcaccgtggtatgagctgccgtcgctggtggatgaccagccgcgcccgaccttctggcgtgtctatttcactatgtggcgctatggtgtgcggcctgccccgcagatgggagccgcagcggatctggattttctgtttccgccggaaaaataaataagacgatgatttctgtcagtccgtgcaacgtctgataacgggcaaaacgaaaagtcgcggtaaatacctccctgtacgctcaggcgcgtcatccatgacgcacatgcttttcgttcgcctgcccgttacccgacgacttacataatccactgatttattaaaatattatttctttccagcttctgtcgccggttttaccgcacttttacggcggaacagcacaataccggccagcagaccaattaccagaccgcccgctccgtacatcatgccctgtaaggcattacgggtttcattcagcagcgggttatccgtgaaatcggtaccgatatggatagtgcggattttccaggcgccgtcctcaagcgcaaccgtcgctgtccagcgggtcggaaaatcgtaggtacggccgtcactcagctgatatttttccatccctttaccgtaggcgacaccccaggttttatccggggataactccgtcaccacatcagcattaaaactgatattcagttttttcaggaacttatccggcccgaaccaggattcaaaatacggttttattgctgctttgccggagataaactcctgggtgatgggcgtggcacgcagattttcactcatcaccggcagcattttgtcataatcaccgctgttgatagcattttccacggtaccgatcacctgccgcagttcatcatgaatagcgccgtcctcttctccgggctgtgcatacaccgaaaaactgaatatcattaacgcactgataattatccttttcatcattatttcctcatcatatatgaaaccgttaccgccaacagcaggccggtgaccacatccgccacatggtgctgatgaaccagcagcacagacagtacaatcagcaccagccacaacagaaacaacagtgtcagcccgcgtccggtatggcggataatggccagcaccgccgcgcacgaccaggccacatgcagggacggcaccagattatgcggatgatccagcgcaaacagtgtcgtgtacatcgtccggtacagcggcgattccggtacctggcggacaaaaccgagctgtgccggaaacagaaaaaagatcacgccgcccagtaatgtcatcaccataaaggtgagtgccagttgccggtgctcccggcgcggcagaaacaaaaccggcatcagaataatcaggtaaaacgagcagtacacccagataaaaccgggtacaaacgggatattcagttcagccggaaaccacagggcatacaggctgtcgcgcccggccgtatatgcattcatcagcgggtaaaccgtgaaaaacaccacgctgaccggaatacaccacagcagataactgatcacccggcgggaaaaagaatccggatcggtattcattcatcccccttattttaaaccaaaacgcatccggtgttttttatgcacctctttgcggaataacagggtataacgccagaaagtggccatacgcgataaggattgcagcgtcagacgcaaatcagaaaaacggcggataatcgacggcacactgttaaaacggctgcgtgcgacatggcacagttctgtcagcgtttccgggctcatatttgcaggctgaaaggcggcctgattaaaacggtattccggatgcagccaccatttcccgtcaaacagcaggcggttttcctgcgccatctgctgatacagcggtgtgttcgggtacggcatcagaatgttataggcggcgaacgcaaagcggtttttcagggcgaatgccacggtatcttccacggtttctgccgtatcgtggtcataccccagggtaaacgccgcccaggtctgcaatccgaagtcccgtaataccgaaatttcctcacgatactgtgaaaatgtccgcatattcggcgattttcgcgcatcacgcagactgtccgggttgatggattcaaatcccatcacattaccccagcagccgctctgctgtaacagcgacatcagacggcggttacgggtcatatccaggcttgcctggcttatccagcgcacattcagcgggatcagcgcactgcacagctcactcagctcgcggtgatcagacgcgatattgtcatcaacaaaaaagataaatttcggtttctgtgtttctatctcccgcaccacttcatcgatccggcggatatagtgctgccgcccgaaataacggctgaccgcacagaaacggcaggcgaagcgacagccgcgggtaaactgcatcaggctgatcggcagatagccttttccccggaagatatcccggcgcggcagacagccgcacagattatgatcgacctggccgactccggcaggagcatcatagcgtggcttcaggcggcctttctccgcatcacggatcatctctgtccagcgggtttccgcgtcaccggtaaaaatactgtcacaatgctgcgccacttcctccggcagcagtgtggcgtggatcccgcccatcaccacccgcacatcacgggccctgtattccgccgcaatctcataagcgcggcgggcggtaaacgtttcgaccgtaatagcgaccagatccgccggttcatcataaggaatggcttccatccgatcatcatacagcaccacttccacatccggtggcgtcagaccggcgagaacaccgagcatcagcggctccatccgcccctcatccacatacagactgtgctcctgacggccgatattcggtttaatcagtatcagtttcactctttttctcccgggcgttttccctgcttgcgggcgatatcccggtgcgaggcaatattgtaaagccaggcaaccagcagcgtgcgccaaccgctccggctgccggaacggcacagacgccggataacggacgcataacggtaaaagcgggtgcgggcataaaaacatccggcagccagttctgcggtgctcattccgcccggccggaaagccggttcgccgtagcggaaatccgggtcaagccaccaggccggataaatcagccgtccttcagcctccagccgggcatacaacgccgtgccgggggtcgggatcagcaggttaaaattggcaatcgccagtttgttactctccgcaaacgccagtgtgctgcggatggtctccggcgtgtcttcgtcatagccgaaaataaaagtgccgtagacacagataccacgccggtacagcgccgccagtacggcagcataatcatccgccgtatggctgcgggattttcccatccgcctcagcgtggtttcattcaggctttcaaagccgatcagcacgaagcagcagccggcggcggccagtttatccagcatttcctcattacgggcgatatcgatacttatctggcatccccagcggcgtttcagcggtgtgagcatcgccagcaactcattcagcgcccgcttaccggcaaaaagattgtcatccacaaaaatcagaaagcgctttgcaggcagagataaaatttcatcccgcatctcatcaaccggccgggtacgcacaccttccggataaaatgcatggatagagcaaaaatcacaggcaaaccggcagccgcgcgagaactgcaccagcgacaccggcacgtagcgtttaccctcaaaaatggtgcggtcaagacggtaaccggcaagcgggcggtcatgcgcgccccggtaacggggtttcagcgcattctgttcacaatccgccagcatctgttcccacgccccttccgcatcaccgagcagcacgctgtccgcatgctgcagtgcttcatccggcataaaagtgacgtggcagccgcccatcaccacggtttttccctgacggcggaaccggtcagccagctgataactgcgctgtgccgtgaacgtttccaccgaaatggcgatcagatccgcatcaggcagtgattccgggatgttatccagccggtcatcataaaatgtgacccggtgcccaggcgacagggcagccaggataccgatcgccaatggtgtcatagcatctttcgtgcggtaatcccccatgttcgggtagatcagcacgatattcacagcagcgctatctccggccagacaatgcggccgtcccactgtggtgcggcagtcagatcgacgccgtaaatccgggtgcggtaaacggatgccccggtgcgtttaatcacatcattagtgcagatatgccccggcggcagcccgacggtcataaccggggtggtgcagtgcaacagcgcttcctcaatcagatcaggcagtttggtatcatcggtacaggccaggaatgacaggaaactctgcggaaccacttcccccgccgccggcatctgcggccgccgggtcattccggcaaaagcgttgtaaagcgggcgcagcattttcattctgccggagtaaccggccacaataacctgtttgaaagcacgctgatcccagagcataccgcaggccaccagttgcccgttctgataactgccgagcaccgtaataccggtttgctgcatcgctttcaggttcagcgccggtgccagctgacgggaagcggattcctgtgcaaagaaacggatgacatcggtgtaatcctccggcggcaccactttccacagtcctctgtctttgcctctgcttttgctgatcgccagcgtgctcatgctgctcagaaaacggtagagcggtagtccttccacgccccgctccagcaggcgccgggccagtaaattattctccgcaatactggtataacagtgatccggtgtcggcagctggcgcagataagaaaatccggcctgtaacactttcaggtgattacggtatttcggcacaatacgcagactgccgagataacccatccgcgcttcttcgccgttaacccagccgctctgtatgctcagctggcacatgccgaccagggtatctccgtctcttgccagtgccggatagacttcaccgaaatcatccctcggagaaaaataaccgggccgccgggtcatcaccagctcccagtccccctgcatggcattatcttcaaggagcctgagtaaatccgcgatatgctccgttgtcgcgtcaataacctctatcatttaacctctgctaatttaccctgccaattctcatcaccgagcggatagccgttgcggcagctgatttcacggtgatgcagccagttaatcgggaaatagttacgaaacataaagaaatcgccccggttacgccagctgcgctgaagaatcgagcgtgaactgtaaaatgccttccttgctgagaggcacccctgcgttactgcctccggagacagctgtgccggactgaacggcagttcgttgtaacggtaatgatcatcgagccaccagtgctcaaagcgcaggcggttttcctgcgccagccgcgcataaagcggcgttcccggaaacggcgtcatatggttgaatgccgcgatatacatactctgttcgcgggcgtaagccaccgcctcgccgaatgagtccggggtatcatggtcatagccgaacacaaatgtgccgtaaacggcgatatgatggcggcgcaggttagccagtgcctgactgtagccgcctttcatggtgttaaaaccttttttcatctgccgcagattggcttcattcagggattcaaagccaatcagcacgccccggcaaccagcctgtgacagcgcgcggacaaattcctcatcatgtgcggcatcaatactcatctgggtcacccagcggatcccggctttcgccagtgccggcagaaactcgcggctttcccgcaggctgcccgcgaaattatcatccacaaagaaaaacagattttttgtgcctttgagacccgccagttccctcagcacatgatccggatcgcgccgccggtaacgctgctgatagaacgactgcaccgcacagaattcacagtggaaacggcagccgcgcccggtttccaccagccctatcggcagataacgttttcccgcgaacaggctgcgatcaacacggatactgcgcagatcagtctgtgttccgtgatattcccgctgcagtgtgccgtggcgtaaatcatcaatcatggtttcccagactgattccgcctctccggtgataatgacatccgcaaagcgtttcacttcctccggcatcagcgtggcgtgaaacccgcccatcagcaccggcacaccgcgctttctgtactcactggctatctgataggcccgcttcgcggtataggtttcaactgaaattgagatcagatctgtcggttcatcaaacgggatcagctccagacgatcgtcgtaaaaccgtgtttcaatatccaccggtgtcagccctttcagtgccgcgaccggcagaggctccatctgccaggatcgcagataggtttcgccgcgccggtggccgatcgccggatgaataaatgtcagccgcatcagtggctgcccgacttcgccggacggtgttcaaccggccagtcacaggtgtaatactgatgcaggtgatgcgcatagaagcggtaacccaggtttgccgtcagcgccagcggtttaaagttacgcgcctgccacagccgcttcgcgatgctgcggtaacggtacacttttttccaggcgcgttcgtgacccagttccagctcatgcgcactcatcagcgccgggcggaataccacatgttgcgcgtcatacagcgaccagtccgtggttaaaatccgctgttcttcctcaaggcgcttaaacagcgacgtgcccgggaacggtgtcagcactgagaaacgtggtaaatcaatcccggcatcgatagccagatccaccgtacggtcaaacacatcggtggtgtcgtgatccagaccgaatacaaaacagccctgaatcgcaattcccagccggtgcaggtcgcctatcagttctttataatccaccgagccgttaaatttcttcccggcatctttcaggctgccatcactgaccgtttccagccccagcagcagccctttgcagccgctgcgggccatcagctccatcagttcgtggttatgagctatcagcacggtggataaaccgaaccactgaatattcagcgggatcagtgcggtaaacagccgtttggcataaccgatatccgacaccaggttcagatcaacaaatattactttccgtttaccggtacgcgccacataacggtggatatcttcaaccacccactccaccggatgctgaaactgcttacgcccccaggcactcggtgcaacacagaactcacagttgtgagcacaggagcgtgtcgcttcaaaaaccccctgggtgagaaaatgctttgcatcaaaccgttcgcgttccggaaacggcaagtccgggatatcaagcgtgaaatccgcgccctgacggtattcacgctgcatattacccgccataaaatcacggataagctgcggccagctctgctcggaatagccggtgcagaccgtatcggcgtgctgcagcgcctcctgcggcagcagtgtgacatgcggcccgccgagcacgacggggatatttttcgcccgcatctgtgccgccagttcataggcgcgcggcgcattccccgtgatcaccgtcatcgccaccagatctgccgtgaaatcctccggcagttcctcaatactttcatcaatcaggcggatattaaccggcagggatttcggcaccagtgcggaaagggtggtcagcgtcagcggctgataacgcagcgagcgtttgaaaatcccgccccgcttgcggtacagcggccctttcggcgaaagcagcaccagatccagcggccgctgcggtgtataaacagtctgtgtcatcacggaaactccctgatctcaaacatggcacgccagtcaggcgaggtcagcaatgccgggattttaatctcccccagccgctttccccgttgaagctgccggtgaaaatagtgctccgccggctgatgcaggcggaggaatgtcagcggtttaagctgtccgatacggcgggcgtagtgatactgcggattggtgcacagatactgctcagtttcctcacaatctgcctgtgcctgtgtctcagtgcaggtatcgctgagcagcagcacatagccctgctcatccgctgccagtacagcaaaattctgcgatggcggtaaaccggcacaaacgaacggctcggtcagtttttccccgaccaaatcactgcatataccctctcgcccgcaaaaacgcagctgcggcagcccttccggcgtgtggccggtacacagaaccagatcatcggtctgatagcggtacagcccgctattcgtggtgacaatcacactgtatgtttcaccggacagcaattcatccgccaaatatatctgcccgttatcccggcggaattcatagaaattactgtctgcactcaattgcgggtcaccgcagtcagacggaacggtgatcaccgcctcggtggagagcagccctttgccctgaagtgtcacgccgggaaagcgcgtcatcagcgcctgtgccggtgaggcggacgcagcctgatcccagcagctgatcaatgccagctgaggccacagcagtgcggtattctgctcctgcagatactgccggtaacgcaccagcgccgccgggtcagcactcagagaatgcccggtaatttccccgccgtcgctcagcagggcggaaatctcagcctgccgggtatcaagagccgtgagcagcggaaataaaaacaccggactccagacggagatcagacgtaaatccgggcactgcagcagatagatcagggtcagcaactgccagtctgccgcatcctcaacctgcgccagtgtcagcggcacagccgataagtcactgaatgccgccagattctccgcccccagatagagcgcatcaccaccgccgaccggaataccgcagggcgtttttgtcatccgtgttactgccgggctgagtgcccagtaaacatggccggaggtcagatcaaaacggcgggtcacatcccgcagccagccggtgacagcaagacggaaatcggttaacccggcagaagtataaggcagtagtttgccaccgctgtggctgccgccggtcagctcaaatgccgtgatcggcgcactgcacaacagattttcttccccggccgtcatgcgggtgataaaagggctgagctcagaataggttgtcagagggacgttctgctgataatccgccacagatgtgacagcggaaaaatgataccgctgcccgtattcacacgccgcattcgcggccagacaagcggataaccagcggaactgtctttcgcgcagagttccctgcggcgcaacagacggcatcccggcacggaaatgctgccaggcattatccatagcagaactcaacatcgggttcttcaaacagtgactgataacgtttcgccacattatcaggggagacttcacacagacagaccagttcatggccgcagacatagtgcgggtttttgtgcaggaaaaaggcaacatccggtttgctgcgctgcgcgtcagtaaccgttgccattgtgcgattcagatagccaaacgccgacgggcattccaccacaccgcgggccgggttatagagtgagccgaatttatcttttgccagttccgccgccagccgtgccagttccggctctttgacattaccgttccagtgcggataaaaggtctgtgccagcgtgctcatataccggtaagtgcgcacgcccttcaccagcaggaaccagaacacccgctcggcgggatattcactgcgcaaaagcgcaatacgccgcagccaggcaccgtgcagcgtctgctgcttccagtgggcgggatgcacaattgtgtcgccggaatagacaatccggtgtccgcggaacggataaaactgcagggtactgaacccggccatttcatcccctgacatcagaaacagaacttcctgtttatgatcgagatctgataaaaactgcgtaccgtcgctgccggtataatacataaaatagagtgaggccatttcctgacgctgtgcctgtgtcagggtttttacaggctgaaaaaatgcgcgatacgacattccgccgtctcctccggtagatttacccgcactgccgcttctccttaagtggaatgcccatcttagcgaccttcatttcagaaacaatcagcgatgcctgaatctttgtttaatatcatgaaaaaacattgtataagccgtttcagcgccggtgaagagcccggagtccgccggaaaaacagcggttacaccagatccctcacctgacagtaaggctcaggcaacaatgactcagccttccggacaaccggcaatccgtgtcaaaatcggccgcgccaggttatccgaatcgttcagttcaccggtaaccgcaacgctggacgatggccgggcggtaaccattctcggtatttatttccagcgcaatatcggcctgagttttaacgacagaaccggtattctgcacggcacaccgacagaatacggtgagtttccggtgcgggtggtatgggagctggcaccgaaaaaacggttttcctccgcaacagtaagctgcccgcccctgcctgttgaagtgcgggggcatttccggcagtgcattatttttttatcataattatttctgagctgccgttatggcagtaaatcacctcaaaagtgaggtactgtcgccaccctcccgttttcagccctcttttgactcagtccgtaacaggtaaaccgtccttctgcggcagattttgcatccagtttccggataaaaaaaggaaatggccggtgatgtctgcctcctgacaacgatttcgtccagataaacggcagcgtttccgggataaataaccgcccggcacccgcagtctgagaacggcgtaacccttttacatgctcacggatgtaactgaccggtaacgttttttccggcacaggtaagatcccgcttaaccggatatacgggtaaaaagcagctaaccgtacagagagccccaattccgccagagaagggtaatccccggccagcaaccgcagacggttccccggtgtctgcggcttgcggcagtaatccggaaatgcgacagcaacagcactgctgttttcaccagttttattctctgccagtatcaggtgaagctgccgccagatttgctggcggagaaatactgccgatatcagtgcatccggcaaaatcgtgattgtctgataaaatcgcatccgcttaccctccgccaccgaaaacaccgccgcgaattaacactgccacgacataattttcttcatgttcagcgagtttttttccgctgacccatttttcaaagagtgtataaaaatcctgccctgaccccggcggacggaatactgcccccagatgtgtgaccgcgccatagggatcggccgcgataacgcccgcccctgcggttaaatcagaaaaggccggataccaggtatccactgagcgcaaagcattgccgattttttgtgaatgcattcccgcagtgccgtcaatatggcagagtatccggctgctccccccctttcttttattcatcacaaattcacaactgggataaatttcctgcccttttccggttatcactctggctgaaacagccagtaataatgcaccatcatcgcaactcagtgctgcggcaatatgtctccccaggtcgccggctatattatccgtctgctcaaaatgacgaaggctgtatttgcgtgcatcaaatacccactgctgttttttttccgcgctgagattatccacaaccacctcaatatgctctgcgccaaccaggttccgccacaaaaaacgtccgcaggcaatattatgtgcatatcgccgcgcaggctcacggcaatgctctctttccagataatccgttattaccgcctgatagcgctgacggaatatttcattattacaggcagcaggatatttcagcccaccggtaattttcagtgagaagctaaatatgattacattttgttcagcttccagcatgcagtaatccatagactgaatattgggatcattaatgttctgtccggatattttttcatttcccctcccgtttttccggcggaaagcaaatgttccccggacagttctcgtctgtattgtcagcggagtaacccgtgaatccggatgctgtgatgttccggaaaaaataccgtcagaggggatcagtttttttgaaaatgataaaacagacggtatattcctgagtccggtcattttctcttttccgttaatcgtgttttccctgctgacacagataaaggttctcgtcaggtaaatagtgataacgccacaacatatccgaaggatcccgcaatttatccaccggccggaattcccctaaggtaataatactttccgcaaaacggtggggtataccttctgccctggcatttttcactattcccggcggggaaagcccctgatatccggtgacgaccgggatcagcaccgaaccgggagcagtggtatatttcagtaatgcctccattgcatccattccgctgttcattgcattgaccatgacatcccgccgctccagtaatgcatatcccgaagcaatacattgccgcaattcacaccatcgcggtttactgtcaggaaaagagccggtctcttgtttaccggaatctgtaatatccccgccggcaattttcagcatttttattgtttcagataccacagtgaggaattccttatttttatcttgtatattcccgccgcaaataagcagtgaaacattgagatgacaatatacgtcctcaaccagtgatggggttttgccttttttatccggtgatttccgcctgtttaatgcggaatacattacccctccgggttccgcatacagttgtaaatgacagtagtgacagataataccagcgtgattaaacctgacggacggaaaaccttgtttcctcacttttcgttcaagagcatgaataaatcccagccaggcagtaactgccgggaaacctgctatcagtgcaccggataacgcattggcattccggataagaatatttttcagcagcagataattaatggacactgtaacgacctccggtagtgacggctcccggcgggacagataataataaacaggctttccctttattctgcatattaagtgcagaaatattttgtggtttagacccgccaatatgaatcacaacaagatgacccgggaatataccggatttaccaagccggcggtataactcaaataataaccccgatggtgtcagaactgacagtaaatgataacccgcattacattctttacccggcacggggaaaaaaacctgttttatctttgaatttgttgacggtacgccctctccggagaatatccgtaaaaaactggcccgcaacttccggtagttttcactgcccagaattttctttgccgtttcactttcctcacacaaatgtgtcagtaatgtttttccatcctgcattttcagcatcagaaacgtatatatttccagtgcagcagcattaccctcagcatcctgcggaacaaccacattaccggatcgcagaaagccatcatttttctttttaacctccgccagtatcgctcccgctttgccatagcgattcctgcgggcacagggatgtgtaaaagcaaacggatgtgtcgtcaatgacagttgttccgcgcgtcctgccgcatcagacagccattgcagacgcgaaaactcaggaattttttttgactcctgatattttgtaaaaaatgcagtaatttccgggtccggcatagaatatccttttcttaaaataatttaatttgacaataatattgaaaattcaatccggcattgaatgaatcttcatcaactgacgggatatttaatatgtctttgaaaggggattgtctaccagcattgtgatttttacgtaccggtgtgttttttttgcgatctgaatggaatttaataaataaaattaacagcaataatacaaaaacggcatatccgaaaagatatgccgtaattattaaatatttatttctttgctggcttattgtttttaagccaatcctgcatctgctttatttccggtccctgtgcatcaataatgtcctgagctaacttacgcatttccggatctgaaccatacttcagttcaatttgagccatttcaacagctcctttatgatgtgcaatcataccttcagcaaatgcaatatccgcattttgctcagataatgtttttgccatatcatcatgcatacgcatcatagaatcacccagctctttctgcaccggagtggtaacagcatgcatatcaccacttaataataccggatttgccacggcaccgaatgtcataacgccggataatagagcagtgagaataagtgtttttttcatgattaattcctttttcgtatttggttgatggaattaatcataaaggttgccctaagggaaaggtcaatgtgataagaaataactttaccatatttacatttaataaagctctctccacaatgtctgaacaattcagatattattctgtcagtcgggcatcagtattaatgcaggtactaaaaaaataatgaaaataataagataacccaataccgcgccaacacggctcttcatccccacaagagaaggctttaccagacctgcagctgcggcaacaagcgccagtcccgcaataaccattaaaccatcttccatatatcctccgttcaccttttcctgcaggtaattctgcgtatgacattgaaccttgccgctaaggcaaagtaaagttcttaaaaatcacaatattttgatggcaaagcaagaagatggtgattaaaaacgcagtcaaaggaatacagaaaagaaaaaaccgggcgttatcccccggtattatatgtgcagttattcttcgtccggttctgcagtagccggttccggcatatttacccattcagcatccgacagatgctgttcccggagtgcttcttcatccagccagtttatgacatatctggcgctgtgctgagtaacaaaaccacagttatcacagataagacgataataataatggtttatactgtctgccggaatccccggagtgtggtaataaaatgtgacgaacgtacgcggaggtttgttatccagccggtcctgcgctgtcgtatagtttgtttcatctataacctgcctgccattatgcccgcacatcagacacgtggttttaacttgcttatcattcagataatgaaaaaaacgcgaccctgtcaccgtttttaagcgttccacaaactcccggatctgaacattatccggtgatgaattatccatcatacacctctggctttgtattgttattccgtttttcaatataaacaccatcaaatattatatattatttatgcactcatgactgactaaagtcagacacatgatattttcattttcacttgtttactttgccatttctccttttccggtatatcccgcataaaaataataaaaccacttcactttaggaccagatatttacataagatcactaattgattaatcttaagaagaggcaatcaataaaaggctatttttgcataatgaaacagttattttcggtgttatttctgtggagcatctccctttctgcttcagctgataccggtccggctgtactgcgctctccaccggatgcagcaaatgcaaaattggtaatttccagcctcagacaggcaaagatcacgccggataacccgttgttttcagagtttaacgatctggcatttgatgccatgcataataaaaattacacatccgctatcaaattcttttctgagaatatgcttcgttatccgtcacctcagatgattataaattataccgatgcaaatcttatgatgctgacggataataagaataccccgggcagctgcgccccttccggtgaggatttacaaacagcattgcgttattaccattccgctctgctcactgataatactgttaatttattatcctgtgatgaaagaaaaaatctgactgagaaaatcacctgccttgaggcatttcagaaaacaccggcacctgcagaattcaggtgccggatattacatccggggtcataacagcacagtaatttttgtgctgttataattttctgacttcatcgatagcattatagagctcaggaacaatctcttgtctgtacccttcttctatcatctcaaacgccttttttctggcggctgctttagttgcgctacccgctgagatatcctcaaccagcatatccaccgcttcattcatttctttcttacaattcttatacgcgttatcggtaattgtttttttgctgtcagtggttgtcagtgcctgcccggcagaataacggataaggcagtttccccatttttcagacatcccgtctgttgcactgttatttgccggtgcctgacagccgccaatcagcataattcccaaaatcaaaaataaacttttttcatgttcatcccttaacggtgctttccgtgtctgtccccggtcatcagtggttttagtattatagtgatattagcaaagagaattggcgatatggaataggatttgacctgatgagagaactgatacctctgtattttctgtgcttcattccggttcaattctgcagcgacttatgccctttgagcacaccgttatcatcaaagataaataacattccctttcctgatgcatcctgacaaaccatgccgtctgcgttcgtgctatccgtaatgccctgacaggccatattactgacataagggcgcaactgacatttcagtgtcctgccatccatgattttaagatgccctgacgctgcaatctcatcagtggatggctccgggcaagtaccacttccccaattagtcccgtgattattatcaaacgcagagcagcctgacagtaaggtactaatcaaaatggtcataatgtatttattttgcatgatttatctcttgattactggtctgaaaattccgggttatcatttaatcatcaaactatcgccgtgggtagggggttgtgtttaagcgaaatgccgatgatcagaatgggttataaaactgtgagatatggatgctgccggtacttaagagagatttcggtgagtatgagcggggaaaagtgaagtgttattttaagcacaaaaaaagcgaccataaaggtcgctctcttttaacgctaactcactgataaatcaatgaattcttatatggtgcccagagcgggacttgaacccgcacagccttgcggccgagggattttaaaaaccatgacagcattttaaaaaacaataagttacgttaattcaactaattatagctattgcttattgctatttattacagtttatccgctcttgctgccacttatttttctatttcatcaagcgggtttaaggttacagcagcatcaagatgatccggtgaaaaatgtgcataccgcatcgtcatcattattgagctgtgacccaatatctgttgtaaaactaatatatttccaccattcatcataaagtgactggcgaatgtatgcctcagaacgtgggttctctgtccttccggtaatgagatattggctttttttaatgcccgctcaaaagcatcgtagcagttagaaaataaagccccccgccgtttgggtaatttgtcaaataaggtccttgatatcggaacggttcggttcttcttggatttggtttgtgtataagtcactttacaaggcataacgtgtgattgagttaagccctgcgcttcaccccagcgtgcgccggttgccaggcaaattcggacaacaatgcctaaatctttattactggagtcatcacacgcagccagtaatctttttatatcctctgcgtataaaaaagccagttcctgatcagactctttgaactggcgaacaccatcaagcggattatcaccagtccattcacctaagcgcctgagctccgcaaatactgcgtgaagatacgattgctcacgattaacagtcgattgctttggtgaccccctgcctttcgcattccacttgccttttaaccggtgttcacggtattgagcaaatagatttttatcaaaatcagaggctaacggatcgctgagccgttcgcatatagcatcaagtttgcctttacgtgacttcccgtcactcagtgttttaccgtgcatatcataccaacggctaattaaatcactgagctgaacagcgttagaatcattcacagaatacaaactgctttcttccgcttcctgcataatgcggcgttcgtaaccgagagcttcgcctttagtggcaaaagtctttcgtatacgctttccgtccctgccctcagggaagcactgacacaaccattttccattaggtaatttgcttacagccacagcgagatcctattttatttgtcacacaacgcgagagcgtcagaaataaacggagccaaacttatttttgcaccaggcatatccggattttctttccagaaagaagaaccgttaatatcgtcagcaggatactttccttttttcgctaattgattggcaagtcctgtcatggcataaacattattcgtgtcatagtccataacaaaagcgccaccatcaatgcactgcaactgaacttcatcacttgtgaaagcccacttgtctccgtaatcatcttttgagattgctttcagcggcattgctaaagcagcagaagatatgagcaataaagcacaggataatactattttcttcattttaacggctcctattttgggtacagtaaattaaagttatttaaccttctttttttcaactaattctgattgcgcgaacgcaacgccaaccgcctgcatatttaatcgtgccgcatcattcattgcgcggtaattctctatcagagtttgttcttcttgtgttatatccgttggtatagacgaacgtcccgtcaaaataaaattagtatcgaatccatacaagccagatagcatcgctaataccgtagcatcaggaaccgtttcaccgcgttcatatttaccccatgtccttgtagacacaccaatatttttcgcgatttcttcttggctgatgccagaattttctctttctcttcttattctctgaccaattaggaacaatagttcctcttttgaggttgacataggaataattcttccttaaagtgatttaaacaggaacttagtggatcacaatatatcatgatgaaacaagcaaaagatcactcacggtcgcgtttaccgcgttccgttgaggaaaaaaagctcgtacctatgcggttgttttgttctgagcatggtgcattagagcaccttgctgagcgagacagccgttccatgtccgctatggctcgtctgatttttctggaaggcttaaaagcctttaacggcaaaaatgatgagcaaggtaacgtatgaattcagtgtcgcttcgccatatgtctcgctgaaagagtatgcccggatatccgggatcacgttaagtacatgcagggctatggtgagacgcggagaaataatcattcggccaaaggtacgcgagaaggacactgttcaggtcaacatgattgcaatgttgaaagacgcattacggaatagttaggtgatcaatggttaagcaaatcagcactcacagccaagaatatcgcggatttattattatcaccctaccgcgtaacgcgacacgaaaaataacgcagtatcacgtcaccttgtctgatggggatgatagctgtcattcgttcgggaagtttgacgcactggcacaggcgacaggttttatagattcattgttcgataaaaaataaaggcggtgaattttgatcacaacaacaaaaatatgtggggaaattatgaatgttcagtttcagcataaattaaccggcgagtcagtcatgcgccattcacgcaaaaaacatacctgcgcagataaagtggcgctgattgtttctttaattgcactggttcttatcatcattaagtgaggttactcatggaacaggcttatgatatcggtgaacaacgtgcatttcctattccaatcagtaagcgtgccgatggtttaaatcatatagcaaaattacgttctgagcgtttcggaattgaaaataaagaactggaatcattctttaaagaaatgcgtgaccgttttgattcgatgtataaggacaataagaaattccttggcgtcattttatatatggcaaacatcgaaaaagaaagacacgattgtgattacaatgatttcagcagtaaagaaatttttaatattgtaaaagcgattaatcatatcagagcaatcagcgcgatattaccgaaacacctagtattaccacagtaattatataaacgaatttttaatgaccctaaccggtcagggctttttattacctgaaataaggaaaaatcatgaccagacctgtacctgttttcataccagccgaacaatcagaaacagataacgcggtagttatcgaatgtgtaattaaacaaaaccgcatggatgaacgtcgtgctgttgctgatcgctatgcatcacgtatgcgcacatttgccgcaatagccatacgggacaaattagattgctatcaaatggctctgttacttgaaagtgaagccagtgaatcagagcgccagattcaggagtggagccatgtctgacgaagtcgaccgtgccaatgaccacgccgtgcttgtgcttgaaagccagatagccgccgctcgtattactgctgcgggtgtgtcggcgtttgaatgtgagggatgcggtaagccaattcctgagccacgccgccgcgctgtgatcggttgcaccatgtgcattgattgccaggcaattaatgaactgaaaaataaacattatcggagtgtgtgaaatggcggagaaaaccatcctcaaatgggcgggttcaaaggtcggcattatggaacagctgcgcccgtacctgccaaaaacaaaacgcctcgttgaaccgttcgccggttcctgtgctgtgatgatgaatactgactatgagcggtatttaattgcagatattaatgatgatttaattaatctatatcgtgaaattaaatccggcgattatcagcgaattttaaatactgcatacggactttttgaacttgagtcatttgaatccggttattatgtagagagagagtttttcaatagaaataaaaaattcataaatccggctgatgctgctgcctattttatttatcttaatcgtcattgttataacggtttatgcagatacaaccagtctggtgcgttcaatgtaccgaaaggaagttataaaaaaccgtatttacctgaagaagaaattatcagattctcaaaaaaagcagtgaatgcagaatttaaagcacaatccgcaggaaaaacattacagagcgtgaaactgggcgatggtgtttattgtgacccaccgtatttaggtacgttctctggttattcatcaggtggtttcagtgaaaaagagcacgaaaatttagcatacgcccttcttacattgaatttatcaatggagacacctataacggtatcaaattctatggccgcaaaagagttgtatgcggatttaggattcaccatccatgaaatagaagcaccgcgcaccattgcggccaacggcaaccgtaagaaagcctctgaaattattgctgtgcttgggggttgccaatgagcattatcgacccgcgcaacggcatttatattaccgatacccgctatgctatcgcccgcaaactgccggaagagcacgcatcacttccggcatatgcgctgattgaggctgatcttgaaaacaatagctggtcgttggtttcccggtatgacaaccctgtcgttatggttgctgaccttgtcgccatgcaggttatcaggccgaaagataaaccggtaaaaacactggatgagtatttgcttttcagcgaaatgatagtgaaacgctgtcagacagcgctgtctgtactccgggaaatgccggttggtgaccagccatgaccggaaaagtcattgacttcagtgtgcagccaccgccggaaccggcggtttttgtacatgagtggaacaaaaagcgacatgaggcggtgctgggttttgagcagccgttaacgcccgcacaacttaaacagaatcaggatttgcaggatgaaattgaacgcctaccgcgtatgctgcgtttcccgttccgtaagcgctatgaaaaaatccatgaagaagaagggctgttagcagctcataaatatctgtatttcaagttttaccgggaaatacttccgcgagttaatgccgttaatgaccgcttttcagtgcgtcatatggatcagtttaatgccctgccggagttatccgacaaggctgttaaattgctggcaaagcaactggcgaaagtattttttgagcgttgccaacagctgatcgataaggtcagcgagattggtgatggtgccatatttaaatttaagtacctgtatgaaatatacgggcacatggctgatgatgccaaagaactgcatattaccccgcttcactacagccggtatctgaaaggctcaattagtgaaaaaaatatccactctgcccttgcccgtctggtgaatgatgatttctggtaccgccgtttacgggcgcaccgggcccgctggcgtgagtcgctgctgattgctgttatggccgtcaacatgaataagcgtccgtatgccagccgtcaggcgattaatgaagtccgcgcccagcgtaaagcgaacgaagaatatctgaaacagatggatatcgaagacaccgagacaggtgagcggtttgatctgtttgagaaagtgatggggagtatttccaaccctgaaattcgccgcatggaacttatggctcagatcgccggcattgaaaaagtggctatgcaacgcggtgatgtcggcatgtttgttaccatcacgacaccgtcaaagtaccatccgacaaaggttaccggtaagaaagacgagaaaaaggccattattaatcataactggtcgaaagaggcttacacgccaaagaacggacaggcatatcttgttcgcgtctggtcgaaaatacggactgctttcaaagactacgggctgaaagtctacggtgttcgcgttgttgagccgcatcatgatgggactccgcactggcatttattgttgttcactgataaagccagccgtgcacaggttatcgacattatgcgcaaaaaagctcttgccgttgacgggaaagagcaaggcgcacaaaaacaccggtttaagtgtgaacacatgaaccgtggcggcgctgtcagttatatcgcgaaatacatttctaagaatatcgacggttacgcactggacggtgaaatcgataatgacaccggaaaaccgctgagtgataccgccgccgccgtgaccgcatgggcggcaacatggcgcattcctcagtttcagttttataacctgccgtcaaagggggcttaccgcgagtgccgcaagttgtgcggtgtttctatcgcagagcagatcggtgatgtggcggaaaaggtccggtttgctgccgataaaggcttttttgatgaatacatcctttctcagggggggccctgcaccccgcgtgacctgcaaacggtcagagtcgcgagacgcgcagctgatcggctgaaccagtacgacgaagaagtcccggaagtattcgggatctactcccctgttttcggcggcgatgtcgtcaaaacccgcgaacgtaaataccagattgttaaaaaacgcgacagtcaaaacccggcaccggttgccgttggttttgattttaatcttttaaagggcggcatcgccgaccctcggagtcctgtcaataactgtggatcggtgatctcaaccgatggtgataaatcgccagatttagcgccaaactacggcatgacaggggtttaccaaataaaaccgtggggttcatgcctgagtaataaagccgctgagaaagcggcacaggaagtaaaaccggcacaaatcgccagacgggttaattcccgcatcactttaagcgacaaagaaatcgcatttatcccggaaatacagaaattcaccgcagcaatggggcatgaaatgccagcggacgggctgatgatgatgtttatccggggcatgaccgttgattacggtgatcaaaaactgttgttccgtgatggccggatgcggctggagctgggcgacgaggaaaaagcagtgagagaacggcagcaggccgataagcgtgagcagaaagcggcgtcaatattgacgcgtgttaagaaaatgaaaaaagaaaacagacgaacttaatcactatgggtatattagcacatacttaagaaattctattgttatagttatgagcagtatctactactggttatcaaattgaacaacaaaaggaatttatatgtcacctataggtatgattgcaaactgggctcaaagcaagcctgtttggtggaaatatgcgctaaaacttgcattaactaatggaactttggataaaagcgacctaaacgatgtactaaggattgcacttacggaacatggactggttgaacctaatgagagatttaaagaatctacaaaacccctagattttactggttatacaacagaacaatatgaagtatcaataaaatcactttatgacgttaaaggtgttggattactcgctgaaaatcaaactataacgtttccagataacgggctttttattatttacggggataatggctcaggaaaatcaagctatgccagtatattaaagaatgtatgcttaacccgtggtgttcctcctcaagtagtagggaatgtttttgctcaaaactccccctctccacaggcaaaaatttccgcatcatataataaacaagatgaaatatatttgtggaataaagataaacctagtagtgaaacactaaaatcaattagggtttttgatagtgattctgctactcactatgtgaataaagaagatgcacttgggtttaaacctgtaggtttaaatttgcttaatgagttagtaaaggcagtaaataacgttaatgcctatgtcagtgaaaataccatgccaggcaatggcttagttaaattaactgaattatcatcctctagcattactgctaaattcgtaaataatttatcggcagacaccaatgaatcagagatatctaaacatattattaccactgaaaacttacaaaaaatagaaccacttagaattgaaatatttaaatataaatctcaaactgcagagtcgataagaaataacctacaacaaaagaaattaatattagaaccattaagcatatatttagataacacattaaaattattagatgacaaagcgcttattatctataaagaattaaaattggagaaagaaagaactgaaaaattatcagaagaattacgcaaagtaattttagatgatttgccattagatggtatagccggattaaactggcaaaatttatggcaagcggcaaagaaatttattgagcaagagtctaataaaaatagcttcccattaattagaggtgcgcattgtcctctttgtttacaagaaatcggagaggaaagtgaaaatagaatggctagattgaatgagtatttaagcaatgaggctgaaaaaaatgctaaattagcaaagaataattttgacaaatcaacaacccttatcaagtcaacttctctaaacttatcttcatatcaagcggcaataacgttattaaataaacaatatgctttatttggtgacgaactaacattattacataagaaattagaagaaagaaaggaaataatattgaatgatggagatgctccactgcctattataaccaatgacagtttagataaattaaaaaaaataattctagaaattgattccgaaataaaaaaaataggctcagatgaggaccttttagctttaattgccaaaaaagaggaaactctatctcattttgaggatatgaaatacgttttagaaaacatagagaatattaagtccaacataaaaagatataagataatcaaaagccttgagaaaattaaatcacaatgtggaactaaatcaatttcaaccctgtcgtctaaaatttatcatgatggtgttgttgaaccacttatttctgcttttaataatgaattaaaatcctttggctttgaccgttttaaaataaaagtcgattcccgtaacaaatctggcgttcagcaatttaaactatctttggcagatgaagataataatatagttggtgcactagatgttacaagtgaaggggaacaacgctgtattgcaatcgcaagttttctggcggaaatgatcgcagactcacgaaaatcggcaattatttttgatgacccagtgaattcattaagtcacgaatggagtagccgggtagctaaccgattagttcaagaatcaaaaaatcgtcaggtaattgtattaacacataatattgttttttataaattgttactcgaagttgctgaaaaaattgaggcacaacattccagtatagcgcttgaacgttcacgcaaatttgctggattagttaaagagtccccaccttgggaaggtatgactaccaatagtagatgcaagacattaaaagttaagttacaagagctaaaaaaattagaaagcaatgatgacacaacaactactgagcttcgccataaatctcttcagttttatggttatttacgagaagcatgggagagattagttgaagaaaagttacttaataaggttgtaacacgttttgaacgtggaatatcaacacaacgtttatctagacttactgatatttgccaagacgatatagataaagtcaacgatgctatgtcaaagtgtagtacatacttcagagggcacgatagtgcgccagctgtcgcagatccatacccaacaattacagagatagaacaagatttagaagcaattaatagttttttggcagagcttgaagctaaaccaagaaagcggaattaattctaaaattaatatgccagcctcgcaggaatacgaggctttttcatgtcaatgctctcataaataatgagtttaaaatggaaaataattcacaaatatctcaattaatccaaaccgccccgactaattaattgcgtatagtgtcattcatttccggaataatttttcatacttgaaacgaattgcatcaatccatgcaaaaaccaccaaaaaccgcataaccggaaaaggatccccatagctgcgcagccctatatccggcggggttcaggtgatcgcttgcaggtgcatgaaaagcggtgcatttagtgggcaggcgtggcggggctacgattgcacggcggcatgtttgttcgcttcccggttgtcgcaaatttcccgggcgtagcggcgttaaaagcaaaaagaggtgatacgggttatcttttttcaggtcgtcacacggtgcgatacaggcggcattacggatggttttagcggggctaaatccggcagattcgtattccggcagcgggtttagtataatatcgtgggccgctattattataggtaacgccgatcttcatcatcatgtacggacgtaaaaaaaaaccgccgggcggcggttcctgtgtttgtattgtgattaatcttccggcagccggtaatcctcaaaccggatcacctccccgccgcaccagtcattcagctgtttcatcttggcctgtagcggcatcagttcattacggacaaatacctttgccgccttttccacatcaccgaagccgccggtattctgcggcagtatgcccatcagttgcggcggtacccggtgggcggccagcatgtcatcacggctgacgttcttgatattcaggaattcatccttggcggcaacttcactgagcggcatgatctgaatcccgtctttcttcccgttcggtgcatacagaaacaggttgcggaagttgccgggtcctttactgctgcgtaccgctttacggatgttgtcgatatcaccgggtgattgtgacgagtcacttatgtacataatgtaccccgcgtgactgccgttgagataataccggcgacggaacagcgtggcggattcgttcagcagggttgacggcagtgcggccagatattccggcagaccgtacagttcctgattcacatccggttcaatcaggtgaaacaccgcaccgggttcaaacgggtacggctcactctcatagccgtatttggtgaaccagtactgatccccgtcaatcccgcgccgggtgtatttcgcaggggcgtgattaaaccgcaggatgccgccgagtcggttgtaacgcgcttcaacgtaagcgttgccgaacatcaggaagtccagcgcgaaactatcaaaggttttccggtctaacagcgggtgcgggataaaggtgctggtcagtatgttacgttttacatagattgcgctgctgtgatgcggtgctgcccggaacgctttggacagcccgttaaaactgagcggcggttcataccagtgctccatccggacacactccaggtaatcataaatctcgcggctgtcgagcaccgacaccggctcaccgaacgtgaacgcttccacgccgccggtattctgttgtttatgctgtttgtttttgtttctgcggctcattaataaagctccacgatattatgatgttgagtgttttcacctgtgataggttcgttatacagggcgtgcattgccgcccaggcgagatccgcatggctagcgtcctcgctgcggctggcttcataggtcgggcggttgccgctggcggtggttgagcggcggatagacataaacgactgaatgacgtcccggtctccggcgtcgaactcaaggcgtccgctgttgatgacatcccatgctttcagcaccagggcgttttttaccgccgggttatagacaaattcccgcacctgtgggaaaaactcctgcacggatttaaagacgccgtggccgatcccggtactgtcgataccgatgtattccacgttgtagcgttcggtcagttgcttgatagcttccgcctgagcgcgaaaatccatcccgcgccactggtgacgctcaaggatgcggaacgcgccgccgaacatcaccggcggtgcgataaccacacacccggcactgtcgccgccctcggtacctttcgccgggtcatagccgatccagacaggccggtgaccgtatggccggtacagttccggctgaaagtcctcccacacatcccatgaatcaaccaggcaactctgcatcagttccagcgaaaaaatggacgcgatatcgtccacaaagtcacacatcagcaggttctgatattcatccgggctgtattcaaggcgcagctgtgcgatatcaaacaggtcacagccgccgcgcaccgcatcttccaccgtgacaatctgccgccactggccatcttcacacagacggccgtcacgcaatgccgcatggctgatatcaatatccacgtgatccgctttggcacggccccggttaaacagttttcctgaccagaacgggtacgcactgtgggtcagacttgacggtgtggaaaagtaggtctgccgccattttttgtgcatcgccatgccggaggcgactttgcgcagctcctggaacttcgggatccagaaatactcatcgagatacagattgccgtgataactttgtgcggtccgggcattggtaccgaggaaatacagcgtggcaccgttcggcaggacaatcgggtcgcctttcaggtcaacatcgacttcgcgggcaatctcaatgatgtactgcttgaatacatgtgcctgtgccttactggcggaaagaaatatctgattgcggccggtcagcagcgcgtccataaaggcttcgcgggcaaaataatatgtcgcccctatctggcgggatttgagaatatcccggatgcggttctgcgccccggcgcggtaccagtttttctgatactcgaacatgttccccatgaaaatctgttccagcttttcgatctgttcgtcgctgaacacatttttttccggggccttacgttcaccggcgttacggttcgccagtttcgggttgagatcggtctcattgccgccgttctgatagcgccggattttggcggcacgctccaactgacggcctaacaggtcaatctctttgtaatctttgccctctttgctttctttggcgataagctggcacagccgcgcttcaatggagaactccacccggtcatagggcgtgatgtcgtcccactggtcgcggcgcttccagctgtgaatcgttgaggctttctcacccagcatttccgcgatccgtgcaatacggtagccgctgaaatacaggtgcatggcctttttgcgtgagtcaaatacggttatcgtttccatgccgccagattactggccgcacttcccccgcgccctgctgttctgttgtataccgcagcggtacaacagcctttcattgtttccgcagcaattcaccggaaccatagccccatcattactgacaatcccgtcctgactgatggagtcattcacatgcccgtaacctcaaagccggtgcgtatctgtacagagggtgccaccactgatggtcgcgtcatacagcgcagctggctgaccgatatcgaaaaaaactacgacccgaacgtctacggggcgcgcattaaccttgaacacattaaatacgagtggatgccgcgttttggtgatgtcgaatcggtttacaccgaagaaatcactgatggggcactgaaaggaaaattagccctgtatgccacgctgaaaccgaccgccgacctgattgaaatgaataaaaagcgtcagaaggtgtatacctcggctgaaatcgccccgaaatttgcagacaccggagccgcctatctggtcggactggcggtgactgataacccggccagcctcggcacgcagatgctgcaattcagtcagggcgccggggaaagcccgttcgcagatcgcaaacagtcgaaagacaacgtgatcacactggcggaagagaccgttatcgaattcaccgaagataagccggatgaaccgaaagtgccgtctctgttcacccgtatcaccgaagtgctgaccgggaaaggcaagcaggacgatgcccgttttcatgatgtgcatcagagcgtcgaactgatcgccaaagccgtcgaagccattcagacagatgttgccgcactgaaaaaaacaagcctgtccgatcctgagccggaagaaatcgcggaactggccgcgctgaaaaaagaactcactgaactgaaagcgcaactgagccagcaggacaacagcggccataagcgcccggtgtcacttggcaacaacggcacacagccggaagaactgctgacggactgctgatcccggcctcaccaaatttgagaaagagaacatgaaaaaagagacccgatttaaatttaacgactacctgatgcgactgtctgcactgtatgaagtgccggttgaggaactgaccagcaaggttgaaatcaccccgtcagtcgcacagacgctggaagataacgttcagcagtctgcggcgttcctcggctttgtgaatattgtcccggttccggaaaaaaccggtcaggtcatcgggctgggtgtcggctcaagcattgccggtaccacggacaccaccaaaacagatcgcgaagcgacagatccgtctgaaatgacagatattaagtatgaatgtcagcagaccaactatgacaccgcgctgacctaccagaaactggacctgtgggcgaagttcaaggattttcagctacgtatccgtaatgccatcatccgccgtcaggcacttgaccgcattatgattggctttaacggtacacaccgcgccaaaacgtctgaccgcgccgcaaacaagatgctggaagacgtcaatatcggctggctgcaaaaagtccgcactgatgcagaagcgcatgtgatcagtgatgtcagagacgatgccggtaacgtgatttctgccgtgatccgcgtgggtaaagacggtgatttcaataaccttgatgcactggtaatgagtgccgttgatgaagttatcgatgaggaataccgggacgatactgaactggtggttatctgcgggcgcaaactgttatccgacaaatatttcccgctggtcaataaagagcaggaaaacagcgaaaaactggcagcggatatgattatcagccagaaacgcatcggcggattacaggctgtgcgtgctccgtacttcccggaaaacgccctgtttatcacccgtctggataacctgtcgatttactggcagtcagaaacccgccgccgccacatcatcgacaacccaaaacgtgaccggattgagaactacgaatccgtcaatgaggcctatgttgttgaggattatcgcggtaccgcactgatcgaaaatattcagatgcagaacggcacccaaaaaccggaagcaccggacaccggtgataccggcaaaaaggacggagaataatgggcggcagtattttccgccgtcatgtgatgcgggtcagtgcacagcaggatgcacagcagcgcaacccgcagacacagaccggcacggcttacacacagatgacactgatgatgaacgctgaccgccgcaggctgaagcgcatccagtcatttgagcgcaaagctgccgtgaagcgggaaatgctgccgaactatgcgccgtgggtcggcggcattctggcttccggcagaggacagcaggacgatgtactgatgcgcgtgatgctctggcggattgatgccggagactttcacggcgcactggatattgcggactacgccctgcgccacggtctgaaaatgccggaaaaccatacccggacaaccgggtgtgccattgcggaagaaatcgcggatatggcggaaaagatgtacgccgccaaaaccccggtaccgctggatgtgctgacccgcaccctgaacctgaccggcgaagaagacatgccggatcaggtccgggcaaatctcctgaaatggctgggctatgcacagcgtgatgacgggtatttacagcctgccacctgttcgtggctgcgggcacttgaattatatgaccgtgtcggcgttaagcaggatttgcgtcagctggaaaagctgatcgccaagcagcaggaagaacgcgacgcggcacaacagaacgagccacagcgccggggcggcacagcggaccagccgaccggctaatccgctgtccaccgcccaccttttacggggtaaccgatggacttcacatccgacaaaacaacagacatagcggacgaaacactcagcagcggggattttttcccggatatcagtctgcggaattatcagcagtccatgctgacggacggcaaagtcaccacagaacggctgcggcacgcactggtcaacgccataacggaagtcaaccgcgaactggcgggctggaaacggtcacagactgccgccgggtttgcctcactggaggccgtaccggccgaccacatcaataacgacagtgagctgatgctgctttaccgccgggcggtatacagcggggcaaaagcgacactgacagagcgttaccgcgacaccgacaccaccgacagcggagaaaagaaagccgccgccctgagtgaaaccgtcgatgatctttggcgtgatatgcagtgggctatccagcgcatcaaaggcgaatcgcacaatatctgtgagctgatatgaaagtcttcgcattacagggtgagacccttgatgccctgtgcttccgggtgctcggacagacggccggagtggttgaacaggcacttgaactgaacccggggattgccggtcacggtgcggtgttaccgcacggaacaccggttgaactgccggatgtggcggaacagccgcaaaaaacaatgatccagctttgggattaataacacctccacaaagggggatgggtatgaaaacgatgaaagaacactgggctgacattctcgacacactaaaaaacgcctggccgcagctgtccggcgtagcgatagcgatttttatccgctatgcgtgcctgatttatgacggcgacacccgtaaaaacaagtgggctgaatgcctgctgtgcggtgcgctgtcatgggcgattatcagcggcgcggagtttatcggtattccgaacggtgcctccggcatgattggcggcgcggtcgggtttttaggtgttgagaagatacgcgaaattgcacaccgcatgattaataaacgactgggagactgattaatgtcacgaggtatccgaaataataatccgggcaatattgattacagtccgaaaaataaatggcttggtgaattaccgtttgatccggcgattgagccacggcactgccgctttaccaaacctgagtacggtatccgggcattgtttaaactgctgcggtcatactcaaaatatccgggtaagccgggtgtgggctgcggaaatattgacaccgtggaagaaattattgagcgctgggcaccaccgaaagaccgtaataataccgaagggtatattacccgggtctgtaaggaaaccggtctgggtcgccgtgactgcctggatgtttacgataaacaaaccgcgttcagactggcaaaggctattattcaggtcgaaaatgcctcacaaccatacgccaatgctgtatttgaacaggcatggtctctgttatgacaactaaagcccgcattatctcgctgctgttcagcctgctgattacgggcttattatcactcggcctgaaacattactatgataaggccggacagctggccggtgaaaacgccgcgctgaaaaaagaccttgaccggcaggccggtattatcgccgcgcagtcatttgaatttaaccggtttaaccggatagcgcaggccgctacgcagagtaatatttcgcagcgtgccgcctcggaggagcgccagattgaataccgcaccattcttaaaaacaatccgacctgcgatctgcctgtgcctcgcgctatttctgacggcctgctccgcgacacgtaccgtctacgtgcccgcacaatgcaccccgctgccggactcactgacaaaaccggtgcctccgtccctgccgcccggactctgacctactgcgagctgccgctgtggattgatttgctgatcacggatctggatgaggcaaacgcgcagctggacggcatccgcgccgccgaaaaggcaagactgcatgaacaaactcaacagcattaaagacactctgtgccggaaaattccgtacctgaaagagaatccggaaaaactgtatctgttcgtggatgacggcggcatttttgccaccaatgaaccctccctctcctacgaatacatttacagcctgaatattatccttgaagcctttcccgatgatcagaatattgtctttgccgtggtggtcgaatgggtgaagcagcatcagccggatattctcgccaacccggacaagcgcgccaacggcatacgctttgaggccgatattctcaacagtcagaccgccaacatcagtattgacctgaaactgacagagcggattattgtttctgtgcaggacggtaaatatcacgttgaggcagtgccggagccggaaaacccgatggacagctgggaatacctgaatgtcagaaaatagtcttgatgccctgaatcatgaactcgccgggctgctggcccgggtcagtccggcagaacggaaaaagctgtcacgggcgattgtccgtgatctgcacaaaagtcagatagcccgcatccgggaacagaaaaacccggacggcagcgcctatacccggcgtaaggcacagtttattaccgtgcagcgcgagatgcgttttatctggcgcgggcgtgagcggcggctgaagaactggcagcagaacaagcggctgatcaccggtaccgatattgataaaaatgcacagcgctcattccgcaagggtgatattcagcggttcacagccattaaaaaagaccggataaaggtcaaaggcaaaaacaagcagacccgcatgtttaaacgcctggcaaccgtccgttatatgcgcgtgttctccagtgaaaacgaggcggcgatcttctttgcccctgccgccgctaacattgctgcagtacaccagttcggtcagaaagaacggttacgcaatcttgatattcagtacccgcagcgtgaactgctgggcttttcgcctgatgatacccgcaggattgaagcggctattatcgacttcctcacatcctgatgttgtatcagcctgacatacaacactgagccggtgcattaatccccggttcggtggcaggctgtccccatgagcgcaaacacccaaatcgcggaactcctccgcctgatcagaaatatcatccgtaccggcgttgtcaccgctgttaaagtcggtcgcggctgtcgtgtgcaaaccggcgatctggaaacagactggttaccggttgtgacactgcgtgccggaactgcccgcagcagttggatgccgtctgtcggtgaacaggtggtgatcctgtctgtcggcggcgaactgaccacggcggttgtgctggcgggacttttttctgatgaatatgacgagccgaccgcctcactgacggcaaaccacattacttatcctgacggcgcagtgatcgagtacgaacctgcgaccggcgcactgattgcgaccggcatcaaaaccgcactgattgaggccgggaaaagtatcacagcgacctcgccggtcgtgattgtgaatgccagtgaaaatatccgttttatcaccccgacggttatctgctctgacaacctgacctgtgccacgctgaacgtgatgcaaggcggcgagatgtccggcagctttaaacacaccggcgggacattctcctcaaacggcgtggtgattgatggtcataaccacggcggtgtagagcgcggcggaagccggacggatggtccgcaatgaaatattacggctttaatgccctgaccggcagcggtatcaccgatattgagcatctccgccagtcggtgcgcgacattctgatgacgccaatcggttcccgtattgccaggcgcacctacggttcactgctgttccgactgactgatcagccggataacaaagcgctgcggctgcaactgatgtctgcctgttattccgccctgctccgctgggagccgcggattcagattcagcaactgacaatttcgtccccgcagccgggcagcattgtgatcgacctgtccggggtgtacgccggaaccggccagccgttttccttttccgtgccactgaggtaatcatgccaaccatcgacatcagccagttaccgccgccggacgtgatcgaaacgttagatttcgaacagattttcactgagcgtaaagccgcattgctggcctctctgccggaagaactgcgggcgccggtcgcccgtgtgctgcaactggaatccgagccgctgaccaagctgttacaggaaaacgcctaccgtgagttgctgctgcggcagcgtgtcaatgaagccgcccgcgcctgtatggtggcttatgcctacggggcggatttggatcagctgggcgcaaacaacaacgttccccggctggttatccgggaggctgacgataccgtgatcccgccactgccggccgtttatgaatccgatgctgatttcaggatgcgtattccgcaggcgtttgaagggatgagtgttgccgggccgtgcggcgcttatgtttttcatgcacgcagcgcttccggactggtcgcggatgcctcggcaatcagcccggagcctgcctgtgtgaccgtcagtgtgctgtcacgcgagggtgacggtacggcatcgccggaactgctggctgtcgtcgataaggcgctgaatgatgaaaatgtgcgcccggtggctgaccgcgtcaccgtgcagtccgttgagattgtccgttacgccattgatgcggtgctttatctgttcccaacaccggaatccgaaccgattgaagcggcagcccgggaacggatagcgcggtatgtgaaagagcagcaccgtatcgggcgtgatatccggctgtcggccatttatgccgccctgcatgttgagggagttcagcgcgtcgaactgaaaagcccggcaaaagatatcgtgatcagtaatacccaggcatcattttgcactgatgtgacggtgacggtcggaggttccgatgagtagccgcctgctgccgaccggatccagtccgctggagcttgccgccgcagaagcgtgtgccgcgatagagcgcgtgccggtaccgataaaaaccctggtcaatcctgatacctgtccgctgcatctgctgccgtatctggcgtgggcgtggtcggttgaccgctgggatgctgactggccggagcggacaaagcgtgacgttatcaaagcgtcaatgttcgttcacaagcataagggcaccatcggggcgctgcggcgtgtcgtggagccgctcggctatctgatcagcatcactgagtggtggaaaaccggcgaccgtaacggaacattccgcctgacggtcggcgtgtcggaaaccggcatcaccgaggaaacctattacgagctggagcgcctgatattcgacgcaaagccagtcagccgccacctgctgggattgtctattaacctgagcacatccggcaatttttactgcggtgccgccaccaacaccggcgacacgctgactgtttatccgtatatcccggaaaccgtccgggtggaaagcgcgaactatctcggtgccgcgctgataaccattgataaagtgagagtaaacccatgacagcaaagtatttcgctatcctgacgaactacggcgcggcacagctggcgaacgctgtcgcgctgggtacgcagatgaacatttcaaaaatggcggtcggtgacggcggcggcatgctgccggttccggatccggcacagacaaaattagtccgcgaaacccgccggtcggcagtcaatcaggtatccattgacgagaaaaacccgaatttcatcattgccgaacaggtgatccctgaaaatgagggcggctggtttatccgtgaaatcggtctgtttgatgataacggcggtctgatcgcagtcggcaacgccccggaaacctacaagccgaatttacaggagggatctggccggacacaggttattcagatggtgctgatggtcagcagcacacaggctatcaccctgaaagtcgatccgtccgtggtgctggcgacgcgggagtatgtgacaaaaagtattgatgccgcaattcaggcatcagaggctaaatctgcaaaaatttacgccactaaaactgagttaagttcagggttatcgggtaaacagccgacaggcgactacgcaaccaggacagaattaaataacggcctgtcaggtaaacagccaaccggcgactatgccacaaaaacagaagtaaacagcaagcttgccaaagaccagaacggcgcagatatcccgaacaaagatacctttatcaaaaaccttggtttaccagaaaagtttcaaccaaaaggaaattatcaaccagcaggggattacccgttagcaagtacggtattttgtgtagggcaaaaatggtacggcatgacatcacagagaaagctggacacggtatataaaaataataccgggaaaggcatttacgtttctgtttgcctggcatcagatggcgtagcagggttggtatcaatgaaaatgtatgctgaagacgtgccggtaggtacatttcaagtgcaggtgctcggggaaaatggccggtatacatacgcaaccgtatcagcgcctataccagccggatcatcatactatttgactgtgccagcggcagaatcaaagttaaatattaactcatggtcggagctacgataatgtacacagaagtcatagcgcaacgttattttaaagatagtgatggtaaagcccggtgcattgatattatgccgatgaataaagatacatgggaatctgaaataccggaggattggcaccccatcagtgagaaagaggcggataaaatcgccaatccgccgctgacaaaagaacagcatatgaagcaggctgaagcgaaaaaacaggcattgattgcggaggtcaacgccgaaactcagatgctacaaacaaaactcgcacttggccgcattaaaaatgatgaaagggcgctgttgaacgcctggctggattatctggatctgctggaagccgtagacacatccctcgcgcctgatatcgattggccggttaagccgcagtaacataaaaaggggtgtatgcccctttgtaactaaaagtacagcctgaatttatatattaatatattgcacatatccagaatccattttttcggttacttttataacatatgacatcttgcttattatttcaccaatcacattataggatggatgtccatgagtattattagttccaaatgaaatagggcagtacattattttagattgtaagaaatcagaattaaaattatgcaaagaaccatgatgaggtatctggacagttcctactgtctcccaataagacccaaatatttttgttatatcaaatttgtttaaattagcatcaccagtaaaaacgcaacctactctatcatatggagattctaagtaataattataaaaactatgatatctaaataactcaccaggatctaaatcataattaataattgaatcttttccacgaatgtcatatggcccagagtaaactactagtgagttttcatttatatttccatcaagagattcgtagatttttttaatgacccttttatctttctcattgactatattatttaaggcatatgtagagtttgttttcaatttaccaacatcaataccagcctttgttaattcatcttctaacttactacttctttctttgtttttaaagttatatggaatgaaacaccaattataatttatgccattaaccactattttaatcggtgttttactggctatatttcttggcaagctttcatttaatatcaacccatcattaatattaccctcatcatcacttgatgattcaacgtacgttatttgtgtatcaccaccaaaaaattcattcggattattaattatgtcataattatcgatattaataccgataatcctataaacattaccaattaatatcttttgctccttacttagcaatggcaatatcacgtgtttaattgtttttacagtatcctttagagttttaattaatgagatatgatcaagatctaaatgtgatatgaataatacatctatactttcattttttgagaagttttgcctaacaacctttttagatttatttatttctcccatacacccgcagtcataaaccatattaaattctttgtgtttttctgcataaaatgcaccttgccctacgggaaaaaaagtcctagtcgccatataaaaataccttttcagtgaaaatatctggcgttatgttaactgaccgtcgctatctaataaagaaagaatgctttgttgtacaactccttcctacaacaccaactgcacgacatcacgccatatcaataacaccatagaaagcaccaaaaagaggagcttctttctatggcacaagattatcatcacggcgtgcgggtcattgaaattaatgacggtacacgccctatccgcacggtcagtacggcaattgtcggcatggtctgtaccgctgacgatgcggatgtaaaacaattcccgctgaacaagcccgttctggtgactgatatccgttcagcactcggcaaggccggtgataccggaacgctggcgcactcgctccaggcaatcagcgaccagaccaaaccggtaacggttgttgtccgcgttgaacagggtgaaagcgaagctgaaaccacatcaaatattatcggcggcgagacggacgacggtcgcaaaaccggcatgcaggcgctgctcgtcgcaaaagcacataccggcgttaagccgcgtattattggcgttcccgggcatgacacgcaggcggtcacatcaaaactggtcacgattgctcaaacactgcgggcatttgcctatgccagcgcctacggctgccagaccattccggacgtactggactaccgcaaaaacttcagtcagcgtgagctgatgctgattcaccctgattttatgtcgtgggattccgtcaaaaatgcagaggccaacgcttacgccgtcgcgcgggcgctggggctgcgtgcaaaaattgacgaagaaatcggctggcataaaactctgtcaaacatcggggtgaatggtgtaaccggtatttccgcagatatatcgtgggaattgcaggacccggcaaccgatgccggtctgctgaatgaaaacgacatcaccaccctgatccgtgaagacggtttccgtttctggggttcccgcacctgttccgatgatccgctgtttgcctttgaaaactacacccgtaccgcgcaggtactggccgacaccatggcagaggcgcacatgtgggcggttgataagccgatgaccccgacactggtcaaagacatgatcgacggtatcaacgccaaaatgcgcagcctgacgactcagggttatctgctcggcggtgagtgctggtttgatccggatgccaacagcaaagaagaactgaaagacgggcaggtggcgatcgattatgactacacaccggtgccaccggctgaaaatatcaaactgcgtcagcgtatcaccgacagatacctgatggatttcgcatcaaagattaaggggtaatcatggccttaccgcataaactgaaaaacatgaacctgtttttcaacggcgataactggcagggaaaagccgaagaaatcaccctgccgaaactgacccgcaaactcgaagcctaccgcgcgggcggcatgaacggtgctgcacacgttgatttagggcttgaagatgatgcgctgggaatggaaatgaccctcggcggtatggaagcacaactctataagcagtggggcattgccgaaattgacggtgtgccgctgcgatttgccggggcctatcagcgcgacgataccggggaaacaatagcctgtgaagtggtcgtgcgtggtcgcttatctgaaatcgacccgggcagtgccaaacagggcgataacactcaggtgaagtgcagctttaaaccgacctattaccggctggtctggaacggtgctgatctcattgagattgatgtcatcaatatggttgaaaaagtggacgggaaagaccgtctggcagaacaacgcgccgctatcgggctgtaacaggaaaaatataaatgactgaatacattaataaaacatctgtggttgttgaactggatgaacccatcaaacgcggtgataccgagataaccagtgtcactatccgcaagcctaaatccggcgcattgcgtggggtgcgtttacaggtactgctggaaatggatgtcaactccatgaccgaggtgttaccgcgtatcaccgttcccgctctgacaaaagatgaaatcggtgcgatgccgccgggtgacctgctcaatatgtcaatcgaggtggtcaattttttgctgccgaagtcgatgcagaacaattacccccaagactgacagtcgatgatttggtggcagatattgccaccatttttcactggacacccgccgacacggcggaaatgagtctgacagaattaattgaatggcgttatcacgcttacaaacgcagcggtaacagtgaatgagcagaaacctccgtttacaggtcgtgttaaatgccgtcgataaattaacccggccgttccgcagtgcgcaagaatccaacaaacgactggcgggcgctgtccgccagtcccgcgatgcactgaaagacctgaaccggcaggccggacaaattgacggcttccgtaaaaccaaacagcaactcaccgaaacgcagcaggcttatcaggcggcaacacaacgcgccgccgccctcgcccgcgaaatgaacgcctccggaaatccgacccggcaacaggccgaagcgcttaaacgtgcgcagcgtgaagccggtcaactgaaaaaccggtttgagcaactacagcgatccacccagcaacagcgcaccgccttacaggctaacggcatctcgacaacccaactcggacaggcacagcgccgcctgaacagcgacattgcccgcaccactcagcaactgcaacggcaggagcagcagctgcgccgcagcgccgaacaagagcgccggatggcagcggccaaaggcagctatcagaaaacgatggatgtccggaataaaatggccggtaccggcgcggcagcgatggcgaccggcggtgcggcgttatatgccgggaagaaatttatggcgccgggctatgattttgaggtcgggatgtcaaaggtgcaggcgctgaccaggcttgataagaactcagaagagtataaagcactgcgcgaacaggcgcggcagctaggggcgaccacggcatttacggcaaacgaagttgcgcaggggcaatcgttctatgctatggccggatttaaaccggagcagatacagaacgccatgaaaggcaccctgtcgatgtcccttgccggtgatatcgacctcgccaccacagccgatatcggatccaatatcctgaccgggttcaaactgaactctgacgaaatgaaccgcgtcagtgatacgctcgttgccacctttacccggtcaaacaccaacctgaatatgctgggcgacacgatgaaatatgtcgcgccggtcgcgtccggtctgggtgttgatctggaaaccgccgctgttgccgccggtaaactgggcgatgccggtatacagggcagtatggccggtaccagtctgcgatctattcttggtcgcctcgctgagccgccaaaacaggctgctgacgcactggaagaactgaacatcaagacccgtgatgccaagggcaacttacgcggcctgccggaaatccttgctgatctggataaaaagacaaagaaaatgggtaccgcgcagcgcgccgggtacttcaaacacattgcgggtgaggaagcattctcagctctgtcagtactgacagaccaggcaggcagcggcgaactgcaaaaaatgatcgccgaagtcaaagcggccaaaggtgaggcgcagaaagtggccgataccatgaccaataaccttgacggcgatttaaaaaacctgacctccgcatgggaggatgtcggtattcagatattcggcggtgttgacagcccgctgcgggatatcgcgaaatccatcactgatattatcagtaaggtcggggactgggcgaaacgcaatccggagctggcgaacacactgacaaaaattgccctggcgctgggcgtgatcctcgccgtgggcggcgcgattgttctgatgctggccgcgatgctcggcccggtagcaatgctgaaactgagcctgtcagtgctgggtatcaagggtgccggtgcgtttggcctgctggcgaaaggattaaaagctgtcggactggccttattcggtatcggaaaagccctgctgacgaacccgttatttcttgcggcagcggcgattgccgccatagcctacgcaatatacaaaaactgggacactattgtcgctttctttaaaaaagtatggacggaagtggttcgtatcttttcctctgcatgggactcaatatccgcttatttcagcggcatgtggacaaacatcagtaacgcctgttctgccgcatggaactggatcaccaatattgtcaccggggcatgggctgcgattaaaaactttttcctgcaatattcgctgccggggattatttaccgcaactgggacggtataaaaaaatacatgtctgagctgtgggaaaccgtgaaaaccaccatcaaaaccaagtgggatcaaatcatcacggatattcagaacctcccggcaaccatgaagcaggccgcatctgacatgatagacagcgtcattaacggcattaacgaaaaatggaaagacctgaagaataaatttgccgaaataaagcaaatggcaaaagacgctcttacgccggactggctgaaggaagcgaaacaggatccgaagttcgtggcggcagtagaggccacaaaacagagcacaacaaccggcggcatccgcaatgccaactggacgataccggataagaagtttgccggggcctatgattccggcgggcatattccgcgcggccagtggggtattgtcggtgagaacgggccggaagtagtggacggcccggcaaatgtgaccggccggaaaaatacggcagcactggcaatgctggcactgagtacgctgtcccagccgatagccgcagcaccggcacaaaccgccggcggttctgtcagcagcgcgtattcatcacagcagaacgccgcgccggtcatcaacatctacccgacaccggtgcattccgcacaggatatcgccagcgaagttgcccgccagctggacgcccacgcccgccgacagcaggccagccgccgcagcgggtacagtgacacagaggagttttaattatggctatggctgcactcggcctgttcgtgtttgaactgcgaaccgtgccgtttcaggggatgcaggaagaaaaacaataccgctttgcgtataacagccgggtcggtaagcgtccgtcctggcaatttttaggattatccaatgatcctatcaccctgtcaggtacgctctgcccggaaatcagcggtggccggttctctatgatggcgctggaagccatggccgacagcggaaaagcctggtcctttatcggcggtgagggaaccatttacgggatgtatgtcattgagtccatcagtaaaaataaaagtgagttttttcacgacagctcggccagaaagatagatttcaccatcaagctgacccgcgttgatgaatcgctgtctgaaatgttcggtgatatcagcgcacagcttgactctctgactgacactatcagcggcatggggaataaaatttctgacagcattacagggttattatcatgacggattttttcctcaccggtactgagtgcgccccggcatattcgctttccgccggatccgtcaacatcaatgaacggattcaggggcggctgatctcactgtcactgacggacaaccgcggatttgaggccgaccagctggacatcgagatcgatgatgccgacggcaaaatgatgctgccgaagcgcggtgaggtgttatcactgcacttaggctggaagaatgaaccgctgatttttaagggtaaatttaccgttgatgaaatagagcacagcggcccgcctgacaagctgaccatacgcggccgcagtgccgatttccgttcgtcactgaacgccaagcgtgaggtgtcctatcacgaaaagacactgggtgacatcatcaccactattgcaaagcggaataacgtggagccggtgatcgaaaagaaactcgctgagattaaaatcgctcatatcgaccagaccaacgaatcagacggttcctttctggcgcggctcggcaaacaggagggcgctgtcgcggccataaaaaacggtcagttgctgtttatgccgcagggcagcggaaaaaccgcatccggcaaaccgatcccgccgctgctgatcacgcggtccgtcggtgacggctaccggttttcactggccgaccgtggcgcatataccggcgttattgcctcatggctgaacacccgcaagccgaagaaaaaagacgaggttaaagttaaacgcaagcggaagaccaaaaggaaaaacccggaaaatatcaaaaaaccggatgagccgcagggggattatctggtcggtgacgaggggaatgtgctgacgctttctcacacttacgcgaacaaaaataatgctgaacgggcagcgaaaaccgcctgggaaaaaatgcagcgcggtgttgcatctctgtctatccagctggcaaaaggccgggcggatatctacccggaaatgccggtaaaagttcaggggtttaagccggaaattgacggcgcagaatggatattgacgaaagtgtcacactctctgaatgacagcggatttacatctgcactggaatttgaagtaaaaatttcagatgtcgaaatgggtgacggataaatacgtaaaataacactgtatacatcatcagtaattgctataattaacgcaatatcaacatgatgataaaaggtaaatcaatcatgatgaaatgtcctctttgcggcgaacttgcccgcacccgcagttcccgtgatgtcaccactgagacaaaagaacgctataaccagtgcacaaatattaattgcggtgcaacgttcgtcagtcatgaaacccttgcaagatacattacaaaacctcaactgatcggtgcggtaacacttcaccccgctaacgataagcaattatcaatgggtttgtaacgcagtgtaaaaaagaactaatttagttggaatgatggcactgtatagaaaatcagtggtgccaatctgctgccacttttgctgccacttttgatcttgatgcacagaaaaacaaagaaaaaagccacctcgagggtggcttttcttaacgctaactcactgataaatcaatgaatttctttatggtgcccagagcgggacttgaacccgcacagcgttgccgccgagggattttaaatcccttgtgtctaccgatttcaccatctgggctgaatatggaggcgcgtcccggagtcgaaccgaggtacacggatttgcaatccgctgcatggccactctgccaacgcgccctggagcgggaaacgagactcgaactcgcgaccccgaccttggcaaggtcgtgctctaccaactgagctattcccgcatctctgaacttactgatttacttatttgttttcgcaaaccgctgtgtcgttcggatgcgttgcattctactgatttcacgctgtgagtcaaccgcttaattcatgaaaaatgatcgttcgctgttttttacagcatatcgatcaggcttcactcaaatccgcccatgcagcgcgtaaatattggaacatagaccagaaagtcaggatcattgcaatgtagaaaaggatgaaagcagcaatttccgtcaggtcattcggccgccagataagccccaccagtgccaccatttgtgccgtggttttgactttacccatccaggaaaccgcaacgctgttgcgcttgcccagctcagccatccattcacgcagtgatgaaataataatttcacgggcaatcattgtgatagcaggcagcgttatccaccagaccgcatagtattctgttaccagcaccagagcggtcgccaccatcactttatcagcgacaggatccagaaaggccccgaaacgggtggtttgttttaaacgacgggcaagaaaaccatcaaaccagtctgtcatcgcagcaatgacaaaaatagcggcgctgacaacaggtgcccagctgaacggcaaatagaaggcgaggacaaagaacggtatcaggataacgcgaaacagagtcagccatgtagggatatttaatcgcataacggagccattattttataagtcagatgaaaaagccgcttgcgcatctgccggcacatattaccgccccgctgattccggggcctgttgcgtgattttcaggttctgcgcaatcctaccggataacatcatactaccacagttacagataactcaccgctgttattgaaaaaattctcttatccgccgcacagataagccctgtttattaatgcttaagtgcatggaaaattttttccgccagtgcatacgagatagtcgggactttggcgatttcatcgatgctggcgttacgcagcggctgtaatccgcccatgtatttgagcagcatctgccgccgtttcggcccgataccttctatcgattccagcgcactggtgtttttaacttttgccctgcgttgccggtgaccggtgatcgcatggttgtgggattcgtcacggatatgctggatcacatgcagtgccggtgagtccggcggcagcgccatcccttccccggaggcggcaaaaaagagggtttccagacccgctttgcggtcactgccctttgccacgccgatcagtttcggtctgtttttatcccagtccacgtccaggccgtcaaaggcttcaatcgctttaccgagctggcctttaccgccgtcgataaaaataatatcggggattttttcattgccgatatgtttgccgtagcggcggtgcagcacctgatccatcgccgcatagtcatccccgggcgtgataccggtgatattgtaacggcggtattccgatttcaccggcccgttgctgtcaaaaaccacacaggaagctaccgtctgatctcccatggtatggctgatatcaaaacattccatacgattgatggtttcaatgccggtcagttctgacagggctttcatacgtgtcgcgatagtggattgctgcgcccgttttgtcatcagcgcggtcacggcattggtgtgtgccagcttcagataacgggcacggtcgccgcgcggtttcggctggataaggatccgccggccggcaaactgagacagggtttcttccataatctctttttccggtaacgggaaatccagcagaatatcatccggtaatgagcggttctcactgccctggagataaaactggccgataaaagtttgtacgatttcgtccggttcagtacctgccgggactttcgggaagtaactgcggctcccctgcacgcggccgttgcggataaacaggacatgaatacaggccagaccggcatcaaaataaacacccacgacatccaggtcatctccggaaccggtaacaaactgtttttcagtgacagcccggacagcctgaatctgatcccgcagccgggcagcctcttcaaaacgcagtgcctgactggcctgctccattttttccaccagttctgtcagcacctgctgatctttaccttccaggaacaggcggaccaggttcacttctctgtcataatcctcatcacttaccagtcctttgacacacggccccagacagcggccaatctggtattgcagacacgggcgggagcggttgcggtagacgctgtcctcacactgacggacggggaacagtttctgcatcagcgccagcgtttcacgcacggcataggcgttcgggaacggcccgaagtattcccctttggcgtgtttggccccgcggtgaacagccagccgcgggtgtttgtcattgctgctcagatagatatacggataggatttatcatcgcgcaacaacacgttgtaacgcggctgatattttttgatataggtgtgttccagcagcaacgcttctgtttccgtgtgcgtcactgtgacatctatctgagcaatattcttaaccagctgctcggttttttttcccgaaacctgcgtacggaagtagctggaaagccgttttttcaaatctttggctttcccgacataaatcactgtgccttcagcatcatacatccggtatacaccgggctggctggtcacagtttttaaaaatgctttcgcatcgaattcagttacaaccgctttttccatacagggtacaaactctctgctctcagtgtttattcattcatccggcaccacgctgtcaatatggatcagtccgtagcgcagtgccagatgggtgagtttaatatcaccattaatattcagcttattaaatattctatatctataactgttcaccgtcttgctgctgagacacattttgtcggcaatttgtgtgactttgatgccctgcgctatcataaccatcacctggcgctcctggtgactcagtttatccagcggattgctgtcatgtgcatgcaggcgggtgtcaagaatggtctgctgggcgatatccggtgccacatagcgctggccccggctgataatccggatggcgtgcagtaaatcctcacggtcactgctctgatacaaataccccgccgcaccgctgttcatcactttatacggtgagatcaggctgtgttcatctgtcaggataatcactttggtttctgaggtatagcgggtgattttttttgcagcttccaggccgctcatcaccggaaaaccgatatcaagcaatgccacatccgcatgattatcacggcaccagcgcactgcaccggtgctgtccctgacctcccccgccattttcatacccggtgttgccgtgataatggcaccaatccctgcacggtaaaattcattcgaatttgccaccaatactgaaatcacacagaactcctttctgaattttcaataaatttaccgtaaattatacaaggcctggttaaaccgttatttaataaagatgacattcttccggtaacaggctgaatattataaatatatctcacgactaaaaattgattgcagtgatgattcaacagaaacagaggacatgaaaggagacggctgccgggagacagcagccggagacaggcagataatgttacggcatatcaggatgaaaacggtcaatgctgaccagttgatcaaaaggcagtttaccgatacgcggataaggctcaccggcggatttaccaatcgccaccatcaggcagatttcatagttttccggcagatcaatgacttcagccaccgcattaaaatcaaatccgtccatcggacaactgtcatagccctgcgcttttgccagcagcatcagcgtctgggcaaaaataccggcactgcgcataatttcatcacgctgggtttccggtttaccgcgatagtagttatcaaccgcattgaccataaaatcccgcaccagcgggtcggcatcacgccagatttcacggggacgggaactccaggctgccacatcaccgcataaaatcaccagcatggaggcgtccgtcatctgcggctgatcccagcccactttgcggatattgcggcgttgtgccggatcctccaccagcagcggccgccagtgctgaaggttaaaggcactcggggcattttccatcgccagtgacagtagtgctttcttctcgttaagcgggatcacaaaatcaggatcaaacttcttggttgctctgcgctgacgcacggcatcaataacattcatacagactcctgtttattccatttattatccggatgatttatttaccataacatgaatttgattccggatgcggggtcacgattacaacgcaaaaaaaacccgcactccggtgagtgcgggttttcagtcattaactgtcagcagaattatacgaacagtttgaacacgatgttaccgatggtcagcagaccgatgatggtaacaaagtagttagatgcctgacctttgtatttgctcagagccggtacgcggttaacagcatacattggcagtaagcacagcagtgatgcgatgattggtgcacccattgcttcaatcaggtccaggatgttcgggttgatgtaagcgatgaaccaggtagaacccatgatgaacaccatagagatcaggttcagtttaccaacgctgactttgtttttgtcgccaccgaacgcaaatttcagtaacagaccgttcataccttccagagtacccaggtagtgaccgaagaaggatttgaagattgcaaccagtgcaatgattggtgcagcccagaccaggatagtcgccagagtaccgttagcgccgcccacgttgttgaagtggtaagccaggtaagtcagaacaggaacgttcatctctttcgcttcagccatgttagccggagacagcgcgaacaggcagctgaatgcgaagaacataaccacacccaccatcagtaaacctgcgcgggagatgattttgttaactttctgctcggtgaaatctttaccgcacgccgcttcgtattcttcacgttttgataccacgaaagaagatacgattggtgagaagttgaaagagaacaccatgatggaaatacccagccatactgttaccaggataccgctgtgaccgaacagctggaagctgtctgcgttcacgctttcaaatacggctgtgttccagtaagggatcagagccagagataacagcaccaggctggcaatgaacgggaataccaggtagctcatgacgcggaccatcagatctttaccgaagtaaataatgacagccattgctaacagcagaatcagtgcaaccacaccccggttcagcggcatcatgcccagctgctgttcccagaatgccataaaggtattggtgatggttacgccgtagatccacaggagcggacagattgcgaagaagtacaggaaagtgataacaacaccaccgcctttaccaaagtgctcttcaacagtttctgtgatatcgcctgacggatttttgcctgacagacataaacgtgctaatgcacggtgacataagaacgcaatcggatatgccagaaccagcatgatcagaatcgggatcaggccaccgtaaccggcacggatcgggaagaatagtacccctgcacctatagcagtaccgaacagaccgagtgtccaggtcgtgtccgatttacgccagcttttatactcagccggaatctgggttttgtcagtactcatgttgcttttccttttaaaagactatgcaaatattatttttcgtgggtaccaataatttcagagatacgagtcaggtcaatgttcccgccggaaatgatgctgactgtcttcttgtgttcgatatattttttcagtttcccgctaagaatcgcagcagacgccagtgcaccggcaccttcggtcactactttgttgcgctggattaacgcaatcatgctttcgcggatttcttcttctgttaccagaatgatgtctgtcaccagctctttcacgatgtcatacgtgatactgcccggagtcgaaacatcacaaccatctgccacagtaccggcatcacgatgggtcgtgattttaccagcacgatatgatgcttccataccatgaacgttttcagattggacaccgatcacattaatagtcgggttgatggatttcagagcaactgcaacaccggcaatcagaccgccgccgccgattggaacgataacgttatcgacgtcatacagatcttcaaggatttccagaccgatagtcccctggcctgcgatcactttttcgtcatcgtatggcgggataaagatacggccttcctgctcaatgatctctcttgctttagcaatcgtgtcattgaagttattaccgtgcagaacaacttccgcagagtaatctgaggttgctgcaattttggattttggtgcaccggtaggcataacaactttgccgttgatacctaacatagcgcaggataaagaaacgccctgagcatggttaccggctgagcaggcaacgatgccctgtgctctttcttctggtgtcagcgaacttaacttgttaaatgcaccacggagtttaaatgaacctgtgcgctgcatgttctcaaattttaagtggattgtgccgttgcacttttcacttaaataattggacttcggcatacccgttttatagacatgtcctctgatggttttttgtgcatcaatgatatctttaatggttaccggcagatcgtatgtaatcatgacaaacctcgtcctatctttttatatatattaaaattgagtctaactataccgacaaatttaaaaacaactgtatttcaaatcatatttttaaaatattcccgaaaaactttctcaacgtgtgatccaatccaaacttctttcggttttctgtcttttttaatgttttatatttcatttcaagttaaatgaaaatgacttaatgttgattatttgttaaataacagcaatcggattaacatttggttgcgcaacgcaatctttttcccattttttgttatcaatgctgcattattgttaaagaatcactgcgtaaaaagacgtataaatgatcccgccacgtaaaaaagggcatgtattttgacaaaaattaatcttaccaaggccccatcttacagcaaaatatcctgatttttttaacaatcctaaaaatgcaatgtgattcaaatcactataaatattatatctatttgtttattaacgatttgaatattttttactcattacaatcctgatttgcggcagatcgtaacatgttcatttgttctgtacgcattatcaccgggtgcttacccaagccaaattcggataaaaaatcatcaaattatttatttatatgttaatgattcccatttatagccggagtgttacatttccatgacataaatcgtaacgtttttttgcctgacagcccaaaaaagtgttcactttaggaaacagctaaatggctgtttttttggcctgaatctgtgttttttttaaccttgcaattaattaaatatatatttaatttgtgacaattttatttatcagacatctttaaaccaaaattaaacaatgaaaaatattaatttactaaatactatttttaataatcaaaaatgatatctggctatttttttataacccgattttttcctttttatttcctcccggacggaaatagccggtttttgcctgtgggtatagtcgctaatgtcaacataagccaactacgacagacggataagcatttaagacttcaatattgcgatttttcagatttaatatttactgtgaaaataatcagcccatgtgataaatccattgccgcacagcattaaaacgacagaaaatgttattttgctaaaatcgattcagtcataagaatggttttatgcgccgctgacacaattatctgttacaacatcctgctcaccctgcagatacttaccggtgtgacaatcctcatacttcctcaatcatggcggctttgccattgcattccgggacagccatgctgtaatgatttacgacttaagtgttaaccccggtaaacaggagaatgtatatgttcgacttgacaggtaaaatcgcagtggtttccggcggcgccaaagggatcgggcgcggcatcgtcaccgcgctgaaaaagggcggtgccaccattgttatcgccgatattgatgaaaaaaccggcagcgcaaccgctgcagagctgggaacagactttatggcactggatgtaacctctcagtctcagtgccgcgctgttatcagtaaggtcagagaaaagtacggtcgtctggatatcctctgctcaaataccggtattttcccgcaatgcaccatcaaatccatgacggagcaggactgggataccatgcagaaggtgaacgtgaaggggatgtttttcctggttcaggccgcgctgggtgtgatggaagaacaaaaatatggccggatcgtgattacctcttccattaccggtccggtcaccggctttccgggctggagccattacggtgcaagcaaagccgcacagcttggttttatgcgcagtgccgcgctggaatatgcccgtctcgggatcaccattaacgcagtccagccgggcaatatcctgactgaaggactgaaagcacagggtgaaacctatctggaccagatgcgtgccactattccgacgcacacgctcggtgagccggaagatatcggttatgctgcggcgttccttgcctctgatgaagctaaatacatcaccggacagaccatcattattgacggtggccagattttaccggaatccccggaagcactgctctgataaaacagcacaggtgaggataccgcccggtatcctcttatctgccctgatccctcgcggcagcaatcagtgcctcgcccagatagcttttttctgaggtaatccccggcaataccagatagtatccgccgccgaacggtttgatgtaacgctcaagcggttcaccgttcagccgtttctgtgtatcgataaagccttttttcaaatccttctggaaggagataaataccagccccatatccagctgcccggacggggtcagccccagcgagtagctgtagctgcggcggcgcagtttggccacgtgtcgctctgtggaacgcggttcagcgcggcgcatgtgagagtcaaataagacccggtcaccgtgcggatcctgcttaaagtccgggtcatcatgctcatgctctttgcccatcggcgcaccgctggctttgtgacggccaaaatcattttcctgatcttccagcggtgtccggtcccagaactccagctcaaaacggataaggcgtaccgcctgataactgccgttctccgcccaggcgggttcccggccggtgatccagaccaggtcgttcatcagggcatcatcaccggcatcggcattgccggtaccgtctttaaagccaaacaggttaaccggtgttgtgcggcattcaatatcccgggccggcagaaaaccgtcaattttccacaacggagctacccggccggagaggcggcgcaacacttcacgcagtgcataaatcactgtttcacggctgttggcacaaaactgcagcaggatatccccgccgcaccaggccggatcaagccggtcgttcgggaatgccgtcatggcggtaaatttttgcggtttcagtggcgataagccgaagcgctcatcaaacagagagtggccgagagagaccgtcactgtcagtgcatccgcagtcagcgccgtaccgagaatcccggattccgccggcggcattctgtcatcgcccggtgccgccgcctggcggttgcgggtcagttccgcaatacagccggtcagccgccggaaaacatcctcaacctcatccagcgttttaacggtcagattcagtgacagaaaaatggcctctttctgctccggtgtgataaccccggcctgatgtttaccaaggtacggaatttcccgcagccgcgcgctgttatcacacgccgccggtgctgcggcggcagaaaaagccggtaacccgccggacaacaggacactccctgcccccagccatttcagggtatttcgtttgctgagactgacagactcttctgtctcagtcagattcactttgccgtgtttcatggttcattccggtatttgtaatacacgtctattttcagttcagcgcgcagttgtgccagagattctgccagcagcgtcaggtctgcatagagttgctgtttatcttccggtgtcagtttctcatattccgcatactgcccccgggtatcccggtaacgggccatgaccgcatccggtcccgcaaactgctttctgagtgcctcattggtttttgcggataataacggcgccagcccgctgacaatgcgccgggccccttcaatattggcggcgatatctgacagatctgaacggctgtagcggttttcatcaccactcagtttagtgctgagaatcagttcaatactgtcatccgcagactgcaccagctttgccgcagggagggtttccacgtcgatccgctgtttcaggtcattaatattgcgcagcagatcggctgtggcggcctgagcggctgcgggatcattttgagcaaacagcgcatattcgatgcggtgaaatccggtgaatttcggatcctgctcgcggctgagaaaatagccggcatgagggttaatcacccggtcagcgtggccgaaaaccaccactgccgcgcggataacctcataatcataatgtgcctgaatataagcctgccgtgcagctgccatatcccccacggccagcgctttttgcagcaattgcagctgatgttcagccgcagctgtctgtttccccatcatcgtcatgtaatccgccacgaccgggcggaatttttcaggtgacggaatatcccctttggcgatcaccacatcactgccggtatccggattacctgcacggtatttttccgcatagccgggagcgctgagcaacagtgatgtcagaatcagtacggctgtccggttaatccgcatgtttttttcctctgcggcagaacagcgcaataatcaccagccagtacaccacaaaagtaatgacactcaggccgataggctgtgcacggtaaccgaacaggctggccaggaagctgccggtggtacctgtgtcatccagccagttggtggtatcccacagcggatagatgaggaaatcattcagttcgatatcatgttcggtcaacaggttgacgatttcttccgttcccttaagcagcagcgaacaggcaaggaacaacagcacaataccggtgatgcggaaaaaccatttccaggcaattttccggtaagtgaacaggaacagccacaacgtcagtgccgctaccgcgataccggccacgacttccccggtaaatgaccacatggtgtctgcattcagccccatcacaataccggagaggaacaccacgatttcactgccttcacgggctatcgcgatcgccacaataaacaacgcgccccaccaggagtgctgccgggcactgtcattcatctcctgctcaataccggatttgagtgatgcgctgtgctgctgcatccagtacaccatctgcacgatcaataccgccgcgaacagcgacataccgatcataaagtacgtctgaccgctgtcatccagcacattaaacacaccatagataagcagtgcgagaaacagtgacagcgcaacaccgagtgccactccgccccagagatagcggcgccctgcggcagcatccggatgctgtttaatccacgcataaatgatgccgaccaccagcagagcttcaaagctttcacgccagacgacaaaaagaacctgtcccataattaattcctgtgaactgacacttattccgcgatgatctcaccggccggatgcgacagatgaaaatcatcaaaaaaggtatattttccgggtttgagcggcgcaatcaccaccacggaagatgcccccggagccagcactttctctttgcgcagctgggtgctttcaaattcgaccggttcggtgccggtattagagattttaatgcggatcggcgtttttgcgggtaccttcagtaccggcggtgtcagttcgccgttattcatttccagttcgacagtgaatttctctgccgctgcagcgggcagtgatatcagggaaagcaccgataaacacagtgccataacaacgagtttcatgagtgacctcagcgggatagcgacatccggtgtccggacagcagaccgcggttaccggcctgctgttttccttaaataataaactcagtaactgcctttgcggccggtaccggcatactcgaagtcccaggagacatcaaacggctcaaaccacggagcaacaccggtttctttatcgatatggcgaccgaaagccacgttgtcgttcatgcttggcggagagatgcggtattcgacgcggtatttaccgtaaccatccagtttcaggttttcaccgtagtgcgggccgtcgctggcaaccatcgccataaaggtaccggactgggcttttttcggatcatccagtttggtgactttgtaatccactttcagatacgggatccagtccccttccgcgaagccgttcgggttttcctcaacggcgtggatatctgcttccaggtggatgtctgacttatccgccgccagatggtgcatttcatgtttgccttccactgccatggtaatcggctgcagatacaccccctgaatctccataccgtttttgataacaggttgtccgagcggatattccagtgccagggcagaggttgataccacgcccagtaatgctgctgccacactcatcccgatacgcatgctgattcctcattgtcattatacaaatagtgctgacaataataatcattaccatttgcgctattcaagtaaaagttatcgcttaccgccacatttttcaatgaaacggttacattttcaccgggattcagccacgaaatacatccgcaaaggcaatgtccggcaggaaatatccgctgttgtataatttgcgcggatgcgttacatcttaatcagccttccgcaaatgagatcacactgatgcaagccgatattgtattgttcgatgattttgaaaccctggatgtgttcggccctgctgagattttcggccgttccccgcattacacactgaattactgctctctcagcggtggtgtgatcaccagttcacagggggctcagataataacaacggtatttgagccggagaaaaccgcactgatgctggtaccgggcggtcagggcacacggcggctggtcagtgatgaaggcatgctcacggcgttgcgtaccgcggcacagcacgcacaatggtgcctttccgtctgtaccggttcggctcttctggcggcggccggtgtgcttgacggccgacaggcgacatccaataaacgtgcctggcagtgggtaacctctctgtccgcacaggtaaactgggtgaaaaaagcacgctggtgtgcggacggccgtttttatacctcttccggtgtatcggcgggcacggatatggcgctggcatttattgctgatcgccacggtgaggccgcagcggaggagatcgcacaacacattgaataccggtggcataatgatgccggtgatgacccctttgccgtataaaaactggacgacaggcaaccatttacgacataatagcgcctctgaaataaaaccggcggatgtttatgttagaaactatcggatttgtgctactggtgagtacctgcggcgacgatgcctgcgaggcactgccggtcacggaagatatctataccagacatgagtgcgaactccgcctgaaatatatcgccaaacgccgtcccaacctctactttatgtgtaacgaggtgatgcgggaaaacggctccggtgatgacgacagccccggaattccggatgatccggaagacacgctccccccggatgagcagccgcaaccgcttaactgaacggattaattccctgttttatcagacgccggaaacggaaaatcgcccagccgttgatcaccagaaacgtcgattcaatcagggtgccgccgactgttcccagccaggcgttatacaccacccagcaggctgttgaacaccagatcacataccgcatacgcaatcccgtcagcagaaaaaacgcaaaggtgctcatcagggtgcccgttaccggcagcacttcctgccaggtgcggatattcggcaccgccagaaccagtgtcagtgaaacaaataaccagagcacccaacgctgacggtggctgatagacacataagtccggatgctgttgagcgtggcactgatcccggcgggataggcaccaagcagaaaaaagtgggatgccataatggcggtgtaaattgataaccggattttgagcttccgctcattgcgctggacaaaaaccgtcgtgccgataataaacgcaacaataccgagcccctgccctgcgtaatacagatagtccatcttcccctgccgtaatcacatgctgaatggttttaattattgtgctgccagcataaacataatttgttcaggttgcgagctattgcacgtttcagacattaaaaaagaggcctcagccccttttctaattgcatcatgccgttatcacatgtgcagtggtatcagcatgccatatagcccggataatgtgtctcgattttgtgataagtccgggttttcttattatcgtcctgaatcacacagattctgctttttgacttcagcgcctgcgggattttttccgcattttcatctgcggcagctgcaataaagatgttaatttttgatttccctttactgtatgtatagggcattcctaacaaacgtctcgcagctctgttagttcgcataataaactcctcattgttgtgaacgttcacctattatagcaacttactgaaaataataaagttttccctaagtggctgatttaccgcctgcataatggtatttccgtgccctatcctgtatgttggatacgacctgttcactgaccgggagagtctgataaatggcgtgtattttttgtgatatcgcggcggggaaagccccctgtcataagatctgggaagatgagcattatctggcatttttgtcgatatttcccaataccgacggttttacggtggtgatcccgaaggcgcattacccgagctatgcgtttgacctggaagacgatgttctgaccggcctggtgctggcaactaaaaaagtggcaaaagttctggaaaaggcatttccggatgtcgcacgctgcggcatgtttttcgagggctacggggtggatcatatccacagtaaactcagcccgatgcacggcaccgcagatatgacagaatggcggccgatcgagcataaacagcccgcattttacacacattatccgggatttttgtcatcccacgactgtgagcgggcagatgataagaagctggctgaactggcggcggctatccgcgcaggtcaggaaaagtgagtgattccggtggtgccttcaccaccggaatgttgtgtcagcggacttcgcacccgaccaccgtggcatacccgagaccatcactgtccatcatcagcagacactgcgggctgagggtttccatcgcttttatcagcatcattgccatcacaaaaaccgcttccctgtcggcgctgacctgattatccgcaatataaatattatttttcaggaaagtacggcgctgtgctttattgcagtactgataaatcacatcctgcgccagttcattttcccgcatcagccagaatgatttctcttcctctttatccagcagattcattttttccatcatcggcagatcggcggttaactgcatttcattgatcggcataaagcgggacaaactaccgttaaacggaaatgtattgcgctcaaaatagtagcaggatgtcagcagaatagcgcctgccatttcgtgataagccggtatctgacccgcctgccagatattcagtccgaccagcagccacatggcgctgttatcttcctcatcaaacagatggccgatatcatccggtgtctgaatgaattcagtcgcacaaccccagattttcgttacattgcgctcaatttctgtattttgcagctgattcggggtgatcacatacacggttttcagttttgactgataaccttcatgctgctgattcagatctttcgccagcgcggtaaaaatagcctcaaccgaatggtcataaccggcaagcagctgtttatcttcttcgtctgtccgttgtttccgctctgaggtataaacctgtttaacacttttcggcatcagcaatgaaaccccggtcaccatcagtctgcgctggcaccagttgacccactcattacgtttgaaattaatggaagcattccagctctgacaggcaatccgcgcctgctcatgacggtgcatggcgtaagtgaacagacacatccagatcagaatgtacggcagatagataaaaatcagtacttccgtcagcgggagtttgaaaatataaaaatcgagaaaaaagataagggccagaacgacgaacagcaaccccagccacagcgtaattttggcgcccggtgcatcacgtttaaccggaaattcaggaacaggccacgacatcggaatatagctccatgctgaaagaaatacagatatgccgctccgggctgccggaacgacgtcagtgtttgttataaaaagagagatcacaaaaaatcgtgactgatacagggaaataacggcagaccggttaaaaactttaatgggacagcatgagacagatcacaaaatccgacagagaacagagagaaataaacagaaattaagaaagaggataactgagaaaaaagagaactgcagggagaagaaagatggtgggtcgtacaggattcgaacctgtgaccaattgattaaaagtcaactgctctaccaactgagctaacgacccatctttgggattgattttcaggaatggtgggtcgtacaggattcgaacctgtgaccaattgattaaaagtcaactgctctaccaactgagctaacgacccatacctgagtgatgcgggagaatcatgtgaagtggtgggcgataccgggctcgaaccagtgaccccctccttgtaagggagatgctctaccaactgagctaatcgcccacttcaggatgactgcaacttacatcattattatgaatggtgggcgataccgggctcgaaccagtgaccccctccttgtaagggagatgctctaccaactgagctaatcgcccattcataacatttactgctttacttcactatcacaacgttcattcttaataagaatggtgggcgataccgggctcgaaccagtgaccccctccttgtaagggagatgctctaccaactgagctaatcgcccgtcgtgatggaggtgcattatagggatctgcgcgtttgagtcaacgctttttcgaaagaaaatgatcgttcgttgtaattttagtcaccctgttctgattatcaccacccgcgcgcagtatgtaagcagaaatcggataaatcgtgatcgccgtcagattcagtgctgcaaaaacgtcctgttttgtcatgtatttttccatttaacacgggaaaaatgactttttcggccttctttcccccttttcattgaggaattatgtctcagtgctaaaatatcccgcatcgtatttcttcatccactacgtctggcgcagacgttatgaaaggcattccaatgagtaaagtaaaaacccgtttcgcacccagccctaccggctacctgcatgtgggcggcgcacgtaccgctctgtactcctggctgtacagccgtcacaaccacggtgaatttgtcctgcgtatagaagataccgatcttgaacgctcaactcaggaagctatcgacgccattatggacgggatgaactggctgaatctcggctgggatgaaggtccgtactaccagaccaaacgctttgaccgctacaatcaggtgatcgacaccatgattgaaaacggtacggcttaccgctgctattgctccaaagagcgcctggaagccctgcgtgaaaaacagatggcaaataatgagaaaccgcgttatgacggttgctgccgtgatcacgctcataaccataccgcggatgagccgcatgtggtgcgtttccgtaacccgcaggaaggatctgttatttttgatgacaaaatccgcgggccgatcgaattcagcaaccaggaactggatgacttaatcatccgccgtactgatggttccccgacctataacttctgtgtggttgtcgatgactgggatatggaaatcacccatgttatccgtggtgaagaccatatcaacaacacaccgcgccagatcaacatcctgaaagctctcggtgcgccggtaccggaatatgcccacgtctccatgatcaacggtgatgacggcaagaaattatccaaacgccatggtgcagtgggtgtgatgcagtaccgcgatgacggctatctgccgcaggcactgctgaactacctggtgcgtctgggctggtctcacggcgatcaggaaatcttcagcattgaggaaatgacggagctgttcaccctggaagccgtcagcaaatccgccagtgcattcaatactgagaaattacagtggctcaaccaccactacattaacagcatgcctgcggaagaagtggctgtgtacctgcaatggcatattgagaacgccgggattgatacccgcaacggccctgaactggcagacctggtccgcctgctgggcgaacgctgcaaaacactgaaagaaatggcggaaacctgccgttacttctatgaagactttgacagcttcgatgccgatgccgcgaaaaaacatctgcgcccggttgcccgtcagccgctggaagtggttaaagccaaactggctgcactgaccacctggacaccggaagccgtacacgaagccattcaggcaacggctgatgaactggaaatcgggatgggtaaagtcggtatgccgttacgtgttgctgtgaccggtgccggtcagtctccgggtctggatgtgaccgtacatgcgattggtcagtcccgctctctggcacgtatcgatatggcgctggcctttattgctgagcgcgaagcacagtaatcattgtcaacgacctgatacccggccctgtgccgggtatttttttgtcattttactgaattgacggctttttcatcggtcgcacacgaatttcatattaagccgttgacagctcagggaaccttgcctattatgctgcgcgtccggtcgattttatcggggctatagctcagctgggagagcgcttgcatggcatgcaagaggtcaggggttcgatcccccttagctccaccaaatctttggtgactgataaataccgtgacatccggttttccggggctatagctcagctgggagagcgcttgcatggcatgcaagaggtcaggggttcgatcccccttagctccaccaaatttaaaccctggtctctgaccggggtttttcgtttctgctttcttgtcattgcgcggtatacccgccatccaccggataaaaaccgccggtacaaaaacgactgtcatctgataacagaaacgcgaccatttttgccacctcttcccgtgttgccatccgtttcatcgggtgactctccgccatcattgcctgtacatcctgcggtaacgccagaatatttggtgtcgccacatagccggggccgaccgcattaatccgcacgccctgttctgcatattccagtgccgccgcgcgggtcagcccgagtactgcgtgcttggcagcggtataaggtgcaatccccgcaataccggtgactccgttacaggctgataaattcaccactgccccgccgccgcttttgataatggcaggaatagcgaatttcatcccgagaaatgtgccggtcacatccgtagccatcacatcctgccaggcctcaaaatcgtaatcctcaatcttcacaccatgcggcccggtgatccctgcattgtttaccaatccgtgtaaagcaccgaatttatctgacactgtgctcaccatccgcttacagtcgctcagtttacgtacatctgcttctattgccagcacgctatctcccgtaggatcccactcatttattgccttttgcagatgttccggatttcgcccggtaatcgcaattttagcccctcttttaagtaattcacgggcaattccttcacctaccccggttgatgcaccggtaaccaggataatcttctgttgaaagtctgtcatagcatcaccttttaattaactttggttaactaaaagcttaattgattaacttttgttaatcaactttcttttcctgattttgcctttcggctaaactaagggtgaggataaaagggaggtgatatgtcattcaaggaactggaaaatacactgtcattgttacagtgcacattggtagcgcaacggaccatctgctcacctgaaaaggtgacgtgggcacagtatgacgtaatggaaatgttgcgccttcagggggatttaaccccgtcggatttaagccagaaactcgggatttcgcgccagaatgtctcgaaatcattacgggcgctgaaaaaacaccagtttgtttcccagtatcagtcggagaccgataaacgggaactggtgacccagctgacaccggaaggtgaagagtttctgtcccgcgcggcaacaggacgcacccgcaatgcagaaaaagtatttgcaagtctggatgacgatgaacagcgccagtttcgtatactgagccggaaagtcatcgatgcactgacccgggatcagtgagcgggacgtttaagcggttttatcaggccacttaaaccttcggttttaatcgcaagggtgagttgcatcagctgccccaggcgcccttccgggaaactgtctttacgggcaaaccagagcaggtattcctcgggaaggtcaattaaacggcaacctttgtatttaccaaatggcatagcagtgttagcgactgccactaaatcttctttctccatcatctctcctgatgtgactgaaacggtcttctgcggaagaccgtttttcagcctgtctgtcagttcagcagtgcaataaactcatcttcattgatcactttaatacccagctcttccgctttggccagcttggagcctgcagcttccccggcaaccaccagatcggttttcttcgagacactgccggtgactttcgcccccagagccgtcagacgatctttcgcctcatcacgggtcaggatctgcagtgagccggtcagcacaaccactttaccggcaaacgggttatccagtaccgatgcatctaccgccaccacatccggccagctgataccgacatctccggtcagatcagtgataacctcgcggttgtgctgctcgcggaagaaattgaccacatgcttcgcgacaacctccccgacatcaggaacggctttcagtgcttctgtatccgcctgctgtaaggcatccagggttccgaaatgttctgccagattggccgccgtggcttcgccgacttcgcggatccccagcgcgtaaaggaaacgggcaaacgtggtctgttttgatgcagccagcgcgtcagtcagtttctgtgcggatttcggtcccatgcgatccagcccggtcagcttaccgggggtcagacgccacagatccgccggggtcttcacatactccgcatccaccagctggtcgataattttatcccccagcccgtccacatccatggcacggcgggacacaaaatgtttgagtgcttctttgcgctgtgccccgcaaatcagaccgccggtacagcgggcaaccgcctcgccttccacccgctcaatatctgacccgcacaccgggcaactgagcggaaattcaatatcccgcgcatccgccggacgctctgattccaccacacccaccacctgcgggatcacatccccggcacggcggataaccacggtatcgccgattttcagaccgagacggctgatttcatccgcattatgcagtgtggcattactgaccgtcacaccggccaccagcaccggctccagacgggcaaccggggtaatcgcaccggtacggccgacctggaattccacatcacggacaacggtcatctgttcctgggccgggaatttaaaggcagtcgcccagcgcggggcgcgggacacaaagcccagcgcctcctggagtgcaatggaatccactttaatcaccacgccgtcaatatcaaaacccagcaccggacggctctcttccaccttgtgatagaaatccagcaccgcctgactgccggtgcagcgcatcacacgatcactgaccggtaagccccaggctttaaattgctgcaggcgatcatagtgactgcccggcagtgtgccgccttccagcacgcccacgccgtaacagaagaaagtcagcgggcgtttggctgtcaccgccggatccagctggcgcaatgaaccggctgcggcgttacgcgggttggcaaacaccttgcccccggtgcggcgcgcttcctcattcatggcttcaaagcctctctgcggcataaagacttcgccgcggatctcaatacgctgcgggatattttccccgcgcagtttcagcggaatagcgcggatggtccgcacattggcggtaatgttttccccggtggtaccgtccccccgggtggctgcctgcaccagactgccgttttcatacagcagactgaccgccaggccgtcgagttttaactcacagcagaatgtcagatcctgcgtgtctttcagacggtcacgtacacgtttgtcaaaggcaagatagctctcctcatcaaacacgttatcgagtgacagcatcggaatctcatggcgcacctgttcaaatgcactcagcggtgatgccccgacccgctgtgtcggggaatccggtgtgataagttccggatgctccgcttccagcgctttcagacgctgcatcaggcgatcatattccgcatccggcacttccgggttatccagcacgtgataacagtattcatgatggcgcagtgtggcgcgcagctgttcaatgtcgttttcgttattttttggcatcatagtgatctgcaatctgtttatacctgaaaaaaacccccgtcattgcgggggtttttgtgcgatttgtgtgtctcagttctgtttggcgacgagaactttgcggatgcgcgccttgtacacctcgattttctgcggtgtcagcattttgcgctcctcatccagaaccacgccgccgacatcagaggcgatacgctgagcagcctgtaacatcagcttgaagttctggtttgcgtcaccgtaagacggcaccatcataaacatggccacgcccggggtttcgatctcttccatctgctccggtacaaacgtgcccggattcaccatattggccagactgaataacaccggaccactgcctgccggatcgacatggcggtgatagatgttcatcgccccgaaacggaacccggcctgctcgatagcggtgcgcagaatatcacctgcgaccatctgtcccggatgggcggacacaaacagtgccagcacaatctcattgttctctgcactgctgcgcggcgcttcctgaaccggttccggttcagttaccggctcttctgtgtgaggcatgtcagtttcagcggcagtgatcaccgcggctgttgtcatgacctccggagccggagctgccggtgcctgtgcttcctgctcaagggcatcaaataatccgatttgcggctctgtttccggtgcttttaccggctgacggcgcgggctctgggctttcggcatcacaggcggttcttccggctctgatgacggatacattctgccggcagataataacggatcctgctcattctgcgcttctgaatacggagagacctgcggagccggatcctccggtaatacagcagagtgacgggagccgtgtgcctctgacatatcatcagcggcttcatcctgcgactcgtatttacgacgcttcatggggcgcgcgcgaaacagggaagaacgctctttacggctcgtccacagtccgtgaagtaacaatgcgatgattgctaccgcacccacaacgattaatatcagacgcaaatcttgcatcagtgctatctctgttgtttaaattaaaggccaccatggcaaaatactatcgtttgattacaagagtatttgtcaatgatgttaagttcaagtccctgcacgaatttcttgcaataaagatcatttaattgctctttttgactgatttttcatcctgacatttcatttgtggccggacaaatcaatagttcagtctgatagtataacgttttccaatcataggagtgaataggaagtatgacaaatcctgtcaggccgctcagcggctttgcatatgttgcacagggatggcggctgatgatgcgtccgggtctccgggccttcgtgattctgccgttgctggccaatatcgtggttatgggcggtgcactctggtggttgttcagtcagttcggcgggtggatagcctggctgatggataaagtaccgggctggctgcagtggctggattatcttatctggccggtggcggtgatttctgtgctgctgattttcagctattttttcagcacgatcgccaatatcatcgcctcgccgtttaacggctggctgtcggagaaactggaagcggagctcaccgggcgtcccgcaccggatcagggctgggcagatctgataaatgatatcccgcgtattctgaaacgtgagatggtcaaactgctttattacatcccgcgtgccgttattctgctgatcctgtttttcattccggggatcgggcagacactcgcgccggtactctggtttattttcggtgcctggatgatgtccgtgcagtacggggatttcccgtttgataaccacaaggtcagttttccggaaatgaaaagcacactgcgccgcgataatatgaccaatctccagttcggttcgctggtcagtgtgctgaccatgatcccgtttgtgaacctgttcattatgcctgcggcggtctgcggtgccaccgcgctgtgggtggatcgctaccgcgcacagtttgtccgcgactgatccgcaacccccttccgtgcagggcggttatcacactgccctgccgttttcctgctccttatactttttcgctattgatcgtctgtccggttataaggatatgccgattatgtatttcctttccgccggtcagcgggtaatgtggttttatatttagtctgattatgaataaccctataaggaaaaccgatgagtaagatatatgaagataattcgctaaccattggtcacacaccgctggtgcgcctcaaacatttcggtcacggcaatatcctggcgaaagtcgaatcccgtaacccgagtttcagcgtcaagtgccgtatcggcgccaatatgatctgggacgcggaaaagcgcggtatcctgaaaccgggtgtggaactggtcgagccgaccagcggtaacaccgggattgcactggcgtatgttgctgccgcccgtggttacaaactcaccctgaccatgccggataccatgagtatcgaacgccgcaaactgctgaaagccctgggtgccaacctggtactgaccgaaggcgcgaaaggcatgaaaggcgcgattgaaaaagccgatgaaatcagcgcgtctgatccgtcccgctatattgtgttacagcagttcagcaacccggccaacccggcgatccatgaaaaaaccaccggtccggaaatctgggaagacactgacggcaatgtggatgttgtggttgccggtgtcggtaccggcggcaccatcaccggtatcgcccgttacctgaaaaacatcaaagggaaaaaagacgtcactatcgtggccgtcgagccggaaggctcccctgtcatcacccaggcactggccggggaagagatcaaaccgggcccgcacaaaattcagggtatcggtgccggttttatcccgggtaacctggatctgagcctgattgaccgcgtcgagctggtcagcaacgaagatgctttcgccaccgcccgtaaactgatggagcgcgaaggtattctcgccggtatttcatccggtgcggcggtaattgctgcggaacgtctcgcgaaagaagataaattcaagggcaaaaatatcgtggtgatcctgccgtcttccggtgaacgttatctgagtactgcgctgttcgccgatatcagtgaaaactgatcaactgaacggattcagtccccgccctgcctgacctcgaaagcacccgcaaagggtgctttttttgtgcaacggatcaaagtttgacactctgcgggatgatttttgtgcggttgtttagtattaaaaaagtaattatttcacagctcaaaataatgacaccaaatacgtatgtcgaatcttcgggttgtgctattttacttgctccggctatgattactgttatatgtcttaatattaaccgccgataaaaaattccaaacatgaggtaacgctatgtatcagcaagaagtcaccattactgcacctaacggtctgcacacccgtcctgcggctcagtttgtcaaagaagccaaaactttcgcttctgacatcaccctgacttccggcggcaaaagcgccagcgccaaaagtctgttcaagttacagactctgggtctgacacagggcaccgtggtgactatcgccgcagaaggtgaagatgagcagaaagcagtagagcacctcgtcaaactgatgggtgaactggagtaatctccttccgccctcacctgtcaggatccccggccaccgtctcatgccggggatagtccgtttccgggtacgctcacgcagcccgctgctgtacgtcccccagtaaactcaaaggtattattatggtttcaggaatctctgtttcaccgggtatcgcttttggtaaagcgttgttactcaaagaagaacctatcattatcagccagaagtcgatttctgctgagcagattgatgctgaaatccggcgtttcactgaaggccgcgccaaagcgtccgcacagctgaatgccatcaaagaaaccgctgaaaaaaatctcggtgcggaaaaagccgaaatttttgaaggtcatatcatgctgctcgaagacgaggagcttgaaaatgaaatcaccgacatcatcaaaagcaaaaaaaccgctgattacgcggtacaccaggtgattgaagaacaggccaccgccctggaaggtctggatgatgagtatctgaaagaacgcgcggccgatgtccgcgacatcggtaaccgtctgctgaaaaatattctcggcatgccgattatcgacctcagcgccatcgctgaggaagtgattctggtttccaaagacctgacaccgtccgaaaccgcacagctgaacctgaaaaaagtgctgggttttatcaccgatatcggcggccggacctcccacacttccatcatggcccgctctctggaaatccctgccgtggtcggtaccgggaatgccactgaaaatatcaaaagtgatgattacctgatcctggatgcggtcaacaacaccatttatctcaatccgtcagaagaagacattgagcgcatgaaagaagtgcgcgatgactatctggcggaaaaagccgaactggcaaaactcaaagatctgcctgctgtcaccctcgatggtcaccaggtggaagtctgtgccaacatcggtaccgtgcgcgatatgccgggtgccgaacgcaacggcgcggaaggtgtcggtttataccgcaccgaattcctgtttatggatcgcgactcgctgccgacggaagaagaacagttccgcgcttataaagaagtcgctcaggcaatgccggatgaagccattattgtccgcaccatggacatcggcggtgacaaagacctgccttatatgaatctgccgaaagaggaaaacccgttcctcggctggcgtgccatccgtatctgtctggatcgccgtgaaattctcgacacccagctgcgcgcgattttacgtgcctcagttttcggaaagctgcgtatcatgttcccgatggtgatttccgtcgaagaagtccgcgaactcaataagatagtggacgaaatgaaacagcagttgcgggatgaacagaaaccttttgatgaaactattgaagttggtatcatggtggaaaccccggcggcagcagttaatgcacgtcacattgcaaaagaagtcgattttttcagtattggaaccaacgacctgacgcagtatactctggctgtggatcgcggaaatgagctgatttcccatctctacaacccgatgtctcctgcggtgctgaaccttatcaaacaagtcattgacgcttcccacgcggaagggaaatggaccggaatgtgtggtgagctggcgggtgatgaacgtgcaactttattgttgctgggcatgggtttagatgaatttagtatgagttctattgctatcccgcgtatcaagaaactgatccgcaatacgcattatgaagatgcgaaagcactggctgaacaggcactcgctcagccgacggcaacagaactgatggcactggtggaaaccttcaccaaagaaaaaaccctgtgctgagaaagccaaattcacgcccggtcccgtatcaacatttaggagagtattcatgggtctgtttgacaaactgaagtcgctggtttcggatgataagaaagacagcggcacgattgacatcgtggcgccgctgtccggtgagattgtgaatatcgaagacgtgcctgacgttgttttcgctgaaaaaattgtcggcgatggtattgccatcaaaccggcagggaataaaatcgttgcccctgttgacggtacaatcggtaaaatttttgaaactaatcacgcgttctccattgaatcggacagcggaattgaactgtttgttcacttcgggatcgacactgtcgaactgaaaggtgaaggcttcaaacgtattgcggaagaaggccagcgcgtacaaaaaggcgacctggtacttgaattcgatctggcgcttctcgaagagaaagccaaatccaccctgaccccggtggttatctccaatatggatgaaatcaaagagatgaccaaaatgaccggccctgtcactgtcggcgaaaccgttgtcatcaaaatcaaaaaataacggcttctccatcacagtctgtacactgaaaaacggtttctgcggaagccgttttttttcgtccgttttcctttgattgattaattctgttgtattatcccctgcctgttgtccggaaattaccggaaaagtatttctcacctcagtgaaatgcgctaacatgatctcccgtgacggtccgcaatttacgcagattacgcactgcctgatacggccggatccgccggaaccacgggcgggataaacgggaagttttcattttcgttcgtcacaaaatggtaatgctatggaatttaattcagttcagacacagcaaataaagcagaacatgcgcctgttcactgagcgcctgtatccgaatggtcatatccccgatgagttcgatgttcagtaccgtacggacaataacaacatactgatttatcagaaacaactcgtctgcccgtgcggcaccccgcaaaccattgaaaaacaaattgccagactgacctggtcagaagctgatgataactggcagcttttttatgtggataacaacaaatggcagccttatccggactgccctgccggtacactgagtgcactgctgaaacaggttctggatgataaatccgaccgttttattttcagttagtcaccacatcacacaattaagccccgttaaggggtttatttgtgaattttgatcgttttcacgtatagtgctcattacgcaggttactattactactaacttatttgccggctttcagattgcgaggtatgtatgtataaaacgattatagttccaatcgatatttccgaaaccgggctgacccgcgaggtgatcccgacgattcagacattagccaaatttgaaaatgccaaaattcactttatagcggtgatcccgtcattctctcactttgcctctttcggtattgcctatgccgcaactctgccggaaaaagatgaaattctggacagcgccaaagaacaactggcgaagatggtcagtgattttaatctgcctgcagagcagtttgaactgcatgtggtttccggctcaccgaaagatcagattctgaaactggcggatactctggaaagcgacctgattgtcatcagctcacgccgcccggatatgtccacctatctgctcggctccaacgccgcagcggttgtacgctacgcccatacctcggttctggttgtccgctgatacgcggcagcgcctgactgaacgcccgttttaacgggcgtttgtttttttattttcctgcaatcagcaaagaatcactgccgggtgtaccagtcacggataaccgcgaggatctgcgcggtatgccggtttccgtctgtatctttaaaatagtgatccagattatcaaaggttctgaatgtcaccaccgggttctccaccgctttctgcatctgcttaaacgatgtgacactgacattggtatcattcaacgtctgaataaccagcaccggttttgtctgcccgttcagtacctgctgcgcatccgccgccagaaattcgcgccaccagcgcatcccgtgctggctgaccagcatatcgttctccacctcattgcgttttaccgcatcagtaaatgccagaaaaccggctaactgagactcctcaagtggctgaggactattgcggaagctgtccgtgacatcatccaggaaaaagcgccctccgccattaacagccaccactgcgtcaaccgccggtgatgccagcgcagtgtgttcagcaacagtcgccccttcactgccgcccagcagcagcacggtgtcatactcccctttcagacggtcgagcaccgcagcatagtcgctgacccgcaccgacagagaatcattgaacatggtttccgccgggcagtctgcccgctcaccatctcggtcattaaaaggcagcgcatcggtaataccgtatttctccaccagcagaatgtcatggtccgggaacgcgccaccgaaagtatccaccataaaacggttgtttttagcactgttacaatcagagccctgaatcagcaccagcaatttgcgggtgggttccgcctgccggtgcagcaggtagtaatgaacagcactgccatcctgacgggcaaggttttctgtccggacagtctcttccccggtattttgtgtttctgatgccattgcaggcgccatcagcagacaacccagcagtgcacagacggcagccttacgcattcttcatcccttcacataaaacagataattaaacaatgtgcggaaaccgagcttctgatacagactcaacccttcggacgacgcttccagataacaatccccgatacaccgcttccggcacagtatcagtgcataatccagcaacagtgtggcatagccgttgccctgatatgcaggaacagttccgagatcatcaatccgcgcgccgtattctgacaacgacagcgtgatgcagctgaccggtttcccctgacacaacagaacagcatggtacagctcagcaccgtttgccattgcccgctgatgatagctgatatagtcactgacgatactaaaatccggagcatcttccccgtcattctctcccgccggaaaagcggcttccagcggctccgcccacaacgaaagctgctcatttacctcacggatctcacatccggccggaagaacagaggacggcagccactcatcaacagacagatgcatagcactggtttcaccgtccgcctcataacccgccgccataatctgcgggtgcagtgtttctgccgcggatttctctgccaccaggcaatgaggtttgtgatgtggcatgaaaggttgctgtgccagtgagaactcattactatccgcaccggcctgcagatagatatagttaaagacaggcaccggcagcggtgtcagatagcattctgcacgatcacttacggtgatgacatcctgcgcgatactgcgccagaaatggcgctctgtcgcgcggtaattctgtaaactcatggtgtctccggaatggtataagcatcggcgggatttattatccccactctataatataagccgttatataccttatcggaatgttaagacattccggagcctgacactcagcccctgcgtattgccataatctgatgcaccacaatgcccgccagcaatccccagaaagctgagctgatacccagcagcgtaatacccgatgccgtcagcagaaaacagataatcgccgcatcccgccctttttcatctgccagcgactgatgcaggctgttcatcagcgtggtcagcagagcaagcccggccaggatctgtatcagaaccgccggaaaggcattgaacagcataaaaaccgcgccgccgaaaatccccgccagcagataaaatatccccgcccagacagctgcggtataacgccgcgccggatccgggtgcacatccggtgccatgcaaatcgcggcggtgatcgccgcaatgcagatactgaacccgccccacggtgccagcaggatagccgccagcgacgagcagctcagcagcacagaggtgtgcggcggataaccgttagcctgtaaaatcgcaatccccggcgcattctgcgaggccagcgacacaataaaaaacggaatgccgacactgatcagggacgtcagggtaaatgacggcatcacaaattccggcagcgcaaacacattgccggcccggacaaaatgcagatcgccgctcagtccggtcacggtgataccggtgatcagggcagcaataatggcgtacagcgggaaaatccgccgcatcaccacatacgcggctatcatcgcggcacacagcacaaagctggtattcagcgcaccgaacgccgtcagcccgaaacgcagcagaataccggccagcatcgccgaggccagtgcgcgcgggatataattcatcagccgggcaaaaataccggtcacgccgcacagaaacatcagtccggaggcaaaaataaacacgccgacggcttcattgatggtcacgccggacaaactggttaccagcagcgcgatccccggcgtagaccaggcggtcagcaccggcattttataccagagcgacaacccgatcgttgtcacccccatcccgatccccagcatcatcagccagccgccggtttgtgcggcatcaagccccgccacatccagcgcctgcagaataatcgccactgaactggcatagccgaccagcaccgcaaccaggcctgtcatcatcattgctggagaaaaggcacgaaaaaatgttaacttactcataggaacacaccatcggatgttatagcagacgatcggactctatcaccggatgctataacggacaatgacatttacccggaataatgacaatttatgcacgatatcacacccgctgttgcagagacctttaaacaactgcgtgccgaacgcgggctgagcctcagccaggcagcacaactgaccggcgtcagcaaagccatgctcggccagattgaacgcggccaatccagcccgacggtatccacgctgtggaaaatcgccaccggcttcaatgtcgctttctctgtttttctggaaggcgcacagccgcaggtgcaggcggggcttcattcgtttgcaacactgccggtctttgaacagacccgctccgggatgcgtgtcacaccgctgatcccgtttgatgatgaactgaaaacggatttactgaagattgacctgctgccgggggcgctcagtgaatccggccctcatgaacccggggttatcgaacatgtcattatgctggaaggtgcattacaactgcggctgggggatgagtggcataccgtttctgccggggaatccctgcgcttttatgcggatatcccgcacgcttacgccaatcccggtaagaccattgtgacactgcataatctgatccattacccgcgtccggcggacaaataaaaaagcggggtataataaatataccccgctttgacttaacggatcgtcttactttatttgtaaaataaaaccaaaataaatacgtgttcagcttaacttattatatatcatccttataccaaccgggatgatatgtttatactgaacagaaaagcatgccattcagaatactatcttctgttatatatggcggtttatttattgtttaattaaacacactcaggcatatcgctatgctgtcgtgatgttttcactggtgttgttactactacctttacggcattttggtgttgttccaaatgactgtcgcagcagtctttcttgtgtcttaaatactattattattatatctggtgttattaatattattgttactgcttattttattattattgctgttagtatttgctgtttcttttttattaagggtattaccaaactgcgggggcattatcgtacagtgatcctgaaccattctgaaatgaaattacagattacggttaaaatataaaaaaaaccaccattcctgccggatacggtggcttaaatacagaattaattaacttatttcagtatgttgtcacacatcatctgaagtgtattaataaaccttgctgcatgaaaaccatcacagactgcatgatgaacctgtacagaaacaggtaatagtacgcggtcaccttcctgctgaaactttgccatcgtaaaaaccggggcaaagtaatcatcatttccggtgatattcagattaaatccgtcaaaacttacccagggtaatgatgatatattcaggtgattctccggtaaatttccctgcggaaacaatccggtatcatgctgatgttctgctgttaccgcattataacctgccataaactcgctgagatccggaaaataacggcaggacagtacggagaatgtttcggtttctttatgaaagacagtaaaaaccgggtctgactgatcccagtaaatcagttcattgtctttcattgccatccggaactccggaaactgattaacagcccgggagatcaggtaaatcatcagcggataaaacttataaccggtttccgtcagtgcggtacgcgaagcggtaatatcgagtttggtggtcaggctgaatccgcatttaatctgctgacgataaagggcaaaatgttccctgcgattccaggtattcaggtcaatccgggtaaaattcatggttattccttctgattaatagtgaaaaatattaataatcagaaggcagtctggttgtctcaatgggtaacattccgtcctccgtaagctgtctggtattcagtaataatacccgatacgggcttaatctgtattaagcccggctttatttattccggccagtcatccgcaaacacatagcggatcagttctgcggattcacggggcggtgctctcagcacatccgccattaaatcaatttccatctgacaggtttgcagcttgtcttccgccagtacatacggatcatccgtcaggaaactatcgccgtatttatccaccgacccctgtatttgtgccgaaaataatgactgaatttcatccgcagaataatgtgcaaccggagccccttcaccggctgaattcaccagatccagcaacgctctgttaccgataataaagtcacggtacccggctgaagcctttttcatatccggcgggcctgatacttccggatgcagtacacgaaagcagaagtcaccggaggtatcctgcgccagtgctttctgcaaaaattccagccgcattttcccgtaattaatcaccgcgtcatcccccgcgagataaagcagttttttaatattttcggtggcccactgctgcaggcgcatataatactcttcccgttttttcgaacccttacccgcatttctgaaatcggcaaaaaaggccccggacataacgggatcaacctgattgatggcttttagtgtcggtaccatctcaagaacctgagtttttatctgttcatttttttccaccaccgcacttttaataaaaaatgcaaaaaacagcgcaatcagtgacagataaactattttcttccggctgatcacaattttgttggtaatcattaatataatcagcaggataatcagaaaaataatcagtacagaaatcacaaaataaacggacattcatctctccggtacagggggaccattcaggcagacaattcttttttagtcagatattggcaataaaataggatcagcccgtgagaacagaagatctgtccggttgaaacaattctctgaaaattcgtttattcatccggcattccatcccggtaactattttccctgatgaccagtatatgccaccggaacacgctattctgagaaaactgtcactaatctgttttattccgcaaacagaaaaccaccggatgagcggtggttttctgtacttattgatatcttactccccccgctgcttaatgcaggtctcttttattttttgtatattatttttcagggagacctgatgttctttgggaaaataactgtaatccagtgaaatataaaaacgggcgttacgcatcatgacaaataaactgatttcgttttcttcggatttataaataaaatgttcttcgtctgcttttttgctttccagtattgagggtttcccatattccgcttcaagattgtgctgtaattctttcagcagtgtctgatatgccgcttcatcatctgtggaataaaaataaccaataccgaccagcccgctgaaatccggctgtccgtactgtggtaagaagcggaattcgtactcacccgcttcatttaatccgccggaaaatgttttggacgtcactttagtcagcgggcagacatattcactgttatccgtttcagacggactaccgagccgtggtaccaacgcctcttccgtcattccccaggtaagaccgaaaggagctgcataacgctcactttgtccggtatccgctgcttttgttttatcacaggcacccagtaatagtgacgctgcaaccaatgcagaaattatcgttatttttttcattgttcagtatatccgctgatttaatgatgacgttatcccgccatatttgacttatcatttaatccggctgttttccggcaacaaacaatatcaatcctgaataaaagtaccagcaaaaaataaagcctccgtaaaggaggctcgtatcagatcccggtgtttttattggcgtaaaaacggcagtactacatccatcagttgttcaggacactcttccgtcacaaaatgaccgcattcactgagtatcgcgccctgcaaattcaccaccctgccctgcattgtcagctgcggggcatcacgggtcgcgtgatcggcaccgatggccagaaccggcatagtcagttttttctctgcccgccgcttattctgcgcgatggtctgcggaatagcccggtaataggcaaacccggcacgcagtccgcccggagaggaataggcatcgatatacgtctgtgcggcaacgcggtcacggcggtacgcccagtggtcaaaaataaaattcagatactcccgctctttaccggcggtcagcgtttccggtaaatcctgaacctgattaaacataaagtgccagaggaaaatattctcctccggatcaacaaaaatacccggagccggtgccagacccggaataacagcctcggtcaggacgatttttttaatatctgccggatagtcaccggccagcgcataaccgacccacatcccgatatcatgaccaactaccgaataggttttataacccagctgattcatcatggtatgtaacgttgtggccaccgcaccggtatcatagccactgtccggccgggcagaaaaaccggttcccggcggatccaccgctatcgccatatatccctgtgctgccagccctgtcatcacataacgccatgtgtaccaggtctgcggccagccggggatcagcaacaccggttcgccttttcccgccgtcacataatgtatccgctgccccgccacatccgtatagtgatgctgaaaatccgcctcattcacctgtgctgttaccggcggtttcggtgtattctccgcaagcacattattgtggattgcgaaagtcattaccgctgccagtaataccttaccgaataatgtattcatacctgttccgtataagtcataagttaaaaagtctccgcagcagcccgtcaaaacggatgttgcctgcaacgaaattcaattatttgtcgatcgacaattaataggttaacgagatatccaaatctttgtcaatcactaaaaaataattctttgttaaacgataaagaactggtagcatttgcctcagataaactatacggagaaaatatgatggccggcagaccacgggaatttgatcgcgaagttgcattacgcaaggctgaacaggtgttctggcagcgcggttatgaaggtacatccatgtctgatctggttgcggcgctgggtattgcatccgcccggatctatgcggccttcgggtcgaaagaaaatctgttccgggaggcgatagccctttatctggcggaagaaggtgcatttgcggatgcggcgctgaaagagccggatacccgcagtgctatcaaaaagctgcttaccggtgccgttgatacctacacccgggatgaccggccgcacggctgtatggtggtgctgtcactgaccaattattctgctgataatgaagccattatgcactggctggcagaccaccgccgggaacggacaagcgggatcatacagcgtctgcgccggggggctgagtccggtgatttaccggaacatacggatacacaggcactcggggactatgtggcaacactgctgcacggaatttctgtccaggctcgggatggtgtcagccgtgaccgcctgctggccatgacagagattgccatgcacatgtttgatctcatgaccgcctcaccggccacacactgaatctgtttctgtctgcaggagaatctctgatgtcctcttccgtccgcccgatctgcacatggctttccgcctcccagcccgcatccggtgaagcattgccgtttccgccggatatgccggccatcaccggcaatcagacactccggcagtcattgcgtatcagcacaggcgggcagaaactgcagctggtgttttccaaccgctacggcacacagccactggtgacaggtgaaagttatctctccgttcccggccagtaccgtgcaataccggtcacctttggcggacagcagggtgcggtgatccctgccggtgataccctgtgcagtgatgaaattgcactgcatgttccgtcattatcggagctcacgctgaggaccttcctgccggagccggtaccacttaataccttccactgggatgcccgtcgtttctctttactggaaccgggtaaccggacgcgacaggaagaggccggaaacggcgaggctgtcagttcccgtcttttacttgaaagcgtgctgattcagccggaatcagaagcccgcacactcgtggtgatcggcgattcaatggttgacggcaacggcgtggacatggacacctatggccgctggactgattatctggcagaacgttttattgacgaaaacattgccgtggtgaatgccggacaatcaggttcgcgcctgctgaaagacggcatcggcatcagtacattatcgcggtttgagcgtgatgtgctgatgcaacccggtgttaccgcctgtatcgtgcaggtcggattaaatgatatcggcctggcgggaaccgatttggacccggcgggttctgtgccttcggcagcggatgtgattacgggattccggcaattgctgaccatggcgcggggaaaaaatatccgtatgaccgtcgtcaccctggtaccactacgcggaaccggtgagtatggtatgaccggtttttattcaccggaaaaagaggctgtacggcaggatataaaccactggatgcgcacaagcggcgagtttgatgctgttattgacagcgaccggctggtacacgacccggtcagtcctcagcagctcagtacggactatgattcaggggatcaccttcatcttaataatcaaggacaccggctggttgcacagtctgtcccgctgacggttatccggccctgataccagaaagccccgctgtttcagcggggcttcgggtataatcgctaactctttgataagtaatggtgccggataccggattcgaactggtgaccttttcattacgaaaccgaagatttattaaaatacaacacgttacaccgcatcttttctcgctctcacgtaccaagatgcataaagttacctgctgatacgcaagcatgcaaaatgttccgcgtcccaaactcgtcccaatatcccatccccctgctatactcccatcatcacccaccactccgaaaccaacatgcacaatatcgccaacctgccccaagacgaaaaagacaaaattaatgccgatttagccgcatccggtatcgcgtacaaagaaagactcggactgccgtatgatctgtacgaaacagaaaaccagcagcccgagcatttgcgcccgtacttcagagagagactggaacattacagggagatcgggaaaaggtttccgcgtgggttcgagtatgagaaggaatgatgtcattcatgctgaccaatcggcactaaactggtaaacttggcttaagtgtaacaataacaaacgaattaacggcgtattgagccatattctcatgctaccataaaaggaatataaagtatcacatgaagaatcaaagaagcgttgcgctaaatttaataaagctaattgcttgcataatggttattgtcgtccatgtttcagcaactaacattgatgatataacatcaagcaagtggggtgtgtcgaatttttataactccatatcaagaatatgcgtacctttattttttatggtttcaggtgctttactcataagagagaataccagctttataaattttataaaaaaacgttattatagagtgattcctccagtaattatttggagtgcaatatactatgtgtatccaatgttctatgggtatgagcaaccaagaacaatcgccagtctgtttaattcaccaatatcggttcatctttggtacctatacgcaataataggcctttatcttcttgtgccgtttttatccatgatttattttaaatcaacattatctgagagagtgttgttcttagctatttggtttataggttcgtctttattccctacacttaacaacactggcgtgtctggcattagcgcatcattatttggtttaaattctttggctggatatattggatatatttttgccgggaaactaatatatgaccttacatacagaaaattctattctgagattattggtctggtaacatttattacttgctcttaccttacattttatttaacgaaaacatactcatattcatcaggcaaatttaatggtgtattttatagttacttatcgtcattagttgtcttatctgcattttctttattttatgtcactataaacataaatataaaatcaagttttattgcttcgtgtttatctgcattttcatcatgcgcattaggtatttattgtttgcaatcaatgatgattaaagaagtagcttacaagttaaatgtcagagctacacatgaccccgctattatatggatacctatagcagttggtgttaccttcgtgtcttgttttgtaatttgctatattgcatcacgaataaaggtaatcagacagattgtgtaatacaataatatataagaagggtggtgattttccgcccttcttacttttacctattatgacatccatgccaaaatggtatcagtatcatcatgattcatccatccaccatgatcaccagtcaccctaatatccttgtatttatgcccgccattttgcaatagcgaacgaaatggtatccagtgcatgtccatatctaatgttctatcttgcatactgtaatagcacaatatcttaggccaagtgaatgtagacatttttattactgatatcctatcagtttcaaactcaggctcagaatacaactttccttttactataattttatttaacccaatatcagaagtgtactcaatggcagatgttttatttaactctttgtcatttactctatatgaagtaaaagccgacatagggtcatgtcctgaagttttctttaaaaagctataaaagctatttggagtaattccataagcagcctccacagattcacgatgtgagtacttccatgctgcatacaagtttgttacagggtacatcaatgtaatactttttatacttttttcaggcatgatcatcgccgcattcaatgtagccaagccgccatttgaagcaccgaccatatgacaatattcggtaacattaaaattattttttatatgggaaacaaaatctttaatattatttcttacaatgtccgccccccatcctgcgctagacccatcgggcattccattgtcattttgagctccacagacaacgtaaccattattcaagagcatctctataagtgggctgctaaactcaacataatcggcacgtttcttatttaaataagcaccattattttgttgatcaacaccaaactgtgtactcccactgaaatttgcggtagcctcagttccattcatcacccacccattaccgtgatttaacacaacaaactcatgttttttcccatactccgtataattttcaggagttctgacaaaacaccaatcgttaccgccagacttagcaccccatttatagatatataggccacggccttttttatctaaaaatttatatcccaatattgaggcaccaacaatcaacgcagatgcactaccaaaaataaaacttctccgtgatatcattgcgttaccaccataaccaaaactaagtctctgttattatacactaaattcccctccctataacgagaggggataaatttacttatgaaacataccacttaatccctgcgtaatgaacagggctattgacggcaccgatctgcagtataccgtactgaatggcagtgatgtaaggaagtgatgacgcggaatttgcactggtcggagttatgctgattgttgaccacggacgaatatttggatttgttattttcactggaagtgtttcattgctaattttagttactccttgacgaggaaatgatgagtcaaacgtaacatttacaccactaatgttatcttcagaacccaatatttttgtatcagcgcccgtaaggtcgacattactaagtatcaacttatcatctgcattttgctttgatattccatttttgcatgcttttacactcataccagtgatagacacatttgcacgaaacatggataaagcggtatcgcaattttccgcatataaattcgtcacagaaaccctgtcagcaaatgcggatatgttaactccctgaaccgttgaattaaccacgctgatattattcagttgcacatcagtagattcgctcacaccaacaccagctctattcgagcccggtggttgcattacgttttttattacgcaattgctgacgatagtcctgcttgctggctttcctggatgaccaagcccaacaccattagaccacctgactgtatcaacattaatatctgtcaccacactatcagtactatcaataccaatagcgctggcaccagtattatatgaagatatgttagttacgataaaattagcaccgagagtatgaagcgttgagtaatttaaacatctagttcctccagtcttcccccatgagcttgtgctgataatatctgctattacgctccgctcagcacataccgatataccctcaagaccataatcaacaagccttacccctctaacttcatgttcaacgccaccatctatccagagagtgctttcagggtaaccagtgtaatcatcctcagaaatataattattacccagcgtaattccataaacacgatgacggttacccccaccggttaagtggataaggcgcatctttgatgaagttacctctttttcattaccatcaatccgaccatgcccttcaatggtaatatcatcaactcctgtcgctgatatcagaacacataaatcagggcagttacgatctgcataaacaacaccatcgattctgattgtcatgctttttgttaagacaatcggctcaatataaatttcagtgttttcgtcaatatgaacaaaattattaaaatcaatgcattttgtcagggcatcggtatcactgttttggcctttgaagtttttgaaattatgtagcggatagccattcagcagaccgcagcagagccagttgctatccggtgacgaacccggtgtgatggttacagggtgtgcgcctttgtagacatagaaaaatccatcaccggcaagcgcagcctctttgtctgaatcaagaatgccaccgtcagcaaatgacgcttttcgcgcaatagtgaggcgactgtaatcagcgtacacagtattaccaaacgatgaacctacgagtttgtcgccgccctgcgcccctaactcctgcctcaactgatcagggtcatacttcagcacgttcggataatagaactgctgcgctccgtatgaatcatacacagccatcgagtggccttgcacggtaatgaacttggcaatctgcccgttatataccggataaccggcctgattgatgatcagcggctgcgacaccggcacagtggttccgtcctcgttttccagatacacctggatttggttttcctggatagtcggatcagtgtcaatttttccgatgaagattttcccgttactcgccgcctggaatttgcgtgcaagcgtgaacaactgcgaaggcatcgaaacgacaacattagggataatatctgacattgctttctccaagcgtgagtagtcgcacgatgatatcaccgtggtcttattgtgaataaatacagtaaattatatgatgcctgtccaccaaaaataccaaaggtgagcacatggcacgtgacgatacgcagttcaatctcaggcttactgccgagacaaaagagaagctgaagcaaagagcgaagatgaacgggcgctcactgaatgctgagcttgttcacattattgacaattatcttgctaccccatcacaaattatcggataccgtaatgaggcagaacggatggcagatcaccatgccgagatgttcaaaaagacagtgttcgataccttggtaaaattgtacggcaacaaagataagtaagattcagatctcacttattgattaagtatcattatgcatttgactttgtgtcggcattaaccaatattcgtgttgctcaataccgagcgtcatgaatgaggttttgttatgagtaagaagccaggcgaaaacacagggaaagatggcggcatttaccgcgaagttggccctcgtggtggtgcacgtgataattatgccaccgtgagagacaacgagagattgccaccgaccactgaaaaaggtaactcttgggttctggataaaagaacgcctgatagtaagcgttaattatattaagccggtaccgcccggctttttagatgctcactgcaaaaatccaccatgcggctcaccagatggcaaaatgtttcatttgccgcccccgcctcaacattcacgccgacacggtgacaaatatcgaatgccatatgagagcactcatgcgccagcgttgatgatttaccgttaaacagaccgatgatatgaattatctgtccatcgttgcttaccgtatggctcatgccatttgcctcaccatctccggcataaacgccgagtctgttatgcaggtctacccacttctccagtgagtcacagaacacaatgcatccagactcaaaaagaggaaccatcattgatgggtaccctctgagtatttttttcattcaggctccaataatgcggattacagcatggacaattagctacttacatatagaatttatagccatgtataatgacaaaaaataaacaattgtgaggtgatggcgtgagaatgttttcaaagtcaacaattgaaaactcaatagcgattttgatcgcagcatgtgccttttactatttttacaatgatattccacttaagtggaggttttttggtgatgcgacaatcgcaataatatcaagtgcaataatttatatagcgctcactgctgcatcagtgaagataaatgaaaaaaggtactccaaacaagtaaagtcaatttgccgagatattggcatttctgacaattctgaagtgccagaagaagttaaaagattcaatgatgccgtgctgttaagatactccgaagaaaaattcgttaataggataactaacctaattggattaatagtgtctatcgtttcggttatcgttgaagtggcttgcatcctttcgttagtcttccttttgttctatatcccaatcaatgactactaccatgatgacttcttaatgtggatgccggtgatgtggttcgttctgttttgggtggtaattttggtaatatccagcgcatcccaattattatttaatagatatcccggggaagctaagggatttaacaaattttacgacaggataagaaatacataagaagggctattgcccttcttcctgatcttcctgcatcagccaccacaaaaaccccattctggcgataatgcgcttgtcctttactggcagcacatcataaaactcacgccatgcctgagacgttcttaattttgcctcatcaaacatctgtccgatgcgtgaccgaccgcgtggtgccggtgtggtcagtccttttgcggcccgctgaaactcagtcgatgctataagtttttcagctgcggtactggattcagccccgcctagcttcctggctttagctgccactctggcaccgagtgagccacctgcaagtgctccaagcggcccggcatttgcaccaaccatggaaccaagcttctcagcgtgttttgccgcgaactcatattgcgcagtaaccgcatcaaaacgcttggtgaagtcgttcagtcttccggtggttatctcgaatgactttgccctgcggatagcatttgccactacatacgtatcgtgaagccctgacatgaactccttcggcatatggttagctagaacccggaggtttcctgatgctctcaggttctggtaccagtcagcaaagccagccggattaaaatcagcgcctcgcttacctgctgataacatatcccgtatggctacaccggcaacttcctgcctcatttgtctggtaggaaggctattcatcagatcaatgaattgttttgaattgcctttagccagtgaagcaacggcaagagaacctttgtttgcgacatcacctgtaaggtttttcccgcgcagagcaaccatctggtcttccatgtttttacgcatttgaaccagtctctgtgcaacctcaaaatcacgccttactccgacctctccgagcgcagcacgctgatcttcagataactgacggtacagatatttgagcgcaccctcgtctgcgtctttatatggcccacgatttttataaagagcctgccccaccaacctgcgctgcttattaagattggcatacgtcagaacaccatcctgaccagggttgaccgccttaaacacattcttctcaatggtgtccagattttcccatccccccagttcatccgctttcctctccagcgcttccgctgtgttgtttgcagatactcttgcgttagctggcaatgcattatcaacacgcctgtaaagctgatcgcttttaccttccagagctgacattctgccatcaaactgaccaatcactttttggttaagagataatgcatctggaacgctggcaacatcatcaatcagtcttccggcattctctgacaacttcattattgcctggtcttcctgtgctttaagcgcagaaccggggcgagatttaattgcctgctctaccgcctggtattgctgattacctgaaagatgcgaaggcaataggtcgtcagtcatgcccagcctttcagctgccgcagcaacctcggcgtttggtttcacatcgagaccgttgagcgtactggcaagatctggatttttatctgccgcagcctgcctgagaacagtctcaacatcaccagcgccaccagacggaggcgggtttctgccgagaatgtcgcctaccttctgagatactgcgttgtatgccttcccgataagcggagtgaccagtcgagctgcaccggatgcagtcatccccaaacctaagtcagcagcaagcgaaccagaatcattgcgctggctattctgagcaagtgcgccaatgatgttttcctgagcaagatcggcaactttggaagccccgcgctcaagacgaccagcatcagcagcagtacctaaagcagcggctgctttttctggccccatagcagggacaagatacgggattacctcagaggcgatcttccctcctgttgtctctggcttcatatcttcaggaagtgaaaaccgcattgccggtgtatatgtaccatcaccaagaccgattttctcaccagcccatgccgctgcactaacaattgaatcaccgatttctggtatgatattcgcggtgttaacgccagcttgagcaaccgattttcctgcttctttcaccccgtatttcagatcatcaacccaatcactttcaggctctgtctgactcgctggcttgtatttaagccatggggcatcattttcagattgctgtgatgcggcctgattttggtagttctcccatggtgcggccataattatttgctccagttatttttatctgaagggtctccgcctttatacgtatacccgccttcctggtggcctatcggcaagccgtatttactctggttaagttcgcctgagtatttactgaattcatcaggatatctgctttccaaccgttttttcccctgctcgaaagtttcgataattccctcaattgatttctttgcctgcttctctgacatacccgaatcaaggctaccaattgcatccataaccttccgaccctcggcatcagaaagtgcgcccatacctcgcatctgctgaataccagacataaagccctgagatttcagagtatcaaccatggccgaagtgtcggatgcatcagtacctggtaagaaccggctaccaaacgggtttacgttcacaccaaaataccctgtaaaaccaggtgaattaatgatgctctgtgccgtttttattgccctgtctgccgaatccacctgacttgcaacagtgtcataccgctctgccttggctgcttctttttgggctcgaataccatcaagcttttgttcaagttcagcctttttgagttcgttagtttcttttgacacctgtcgatccaaagccttttctttatattcaaggcctttaagttctctgtcgaggttaaggcgttctctggcgatatctgcattttgcttttgaatgctaatgccagcccaaccacgcgcattagattgctcatcacgacgggcggttaacgcctcattggcctgattgctgcgaactgtttcagccagttttcctcggtcaatctggcgcccctctttcgcgtcaataatgtcaaaatacttttcatgacctactgcgctaaggccaacccaatcggctaattctaccgctgaattagggtcttcctttaaccgcttctgcaaatcagcagggtcaaccccaactcgcaggaactcagccgcatttttggcaacgaactgatcgccagacccggttgccgcagcggtacgaaaacctgccgccaagttacctatcgactcttttgtgtcggcagatattcctgtcattcctttgccgatttgctcacccatttcagggtattcagcaaaaagaccccgcatgctgtggatgtcacctgccgctctggcctctccatatttttgcaggaactctttctgccgttgttgctgctggtctgcctgatatatgtcagcaagcccccttagccctgataaagcttgcaggccaaggttgttagccccgcttctctgtaattcattgttatccctgatcatgccaagagttgcattaatatcgctggctctcggcgcgttatcattcgtctttccgaccccagccaaaagaccgcctgaatttatactttgattccatgtcgccatcagaaaatacctccaagcaaaccaatgccgcctccaattgcagcacccaatccagtcccaagaccagggacaacgctacctaatgcagcaccggatgccgcgccgcctaatgcaccaccgagagcctgctgaaaaccggatgggcggttagcatttgctgcggcaagagcggctgattgttgcaataattgaccggtgttatttgcatacgattgtccggcgcttgcctgcccctgcaatgctccaagtccgatatttgccagattctgatagttgttcatctgaccagacaaccaattctgaccgagcgtaggagctattgccgcaagctggtttccggttgctgttgaaccaaggccgccggttgcctctgccgcattaagagcctgataccgcgcctgatcagccatgtctttatattgctgtgagccgtaataaccctgtaatgcctgcccctgcccctcaagcgttgacaacccctgaagctgcttaatgtactgctctgccattggggtgaacggagcaaggttctgcatgttcgtctgccacatttcacgctgtagcgcagtagcttcgcgggtagcatcagcctgagcgcccgcgccgccatcaccaccgcctttcatgtaaccatgcattggttgcagtgagtttctgaatttctctgaaataatcagcattttaataactcctcatattgagatctctttagctgatacagcgtgacacctacaggcgaaccattactgatataagcatcatccaggtgtccgattctggtagccccgagcatgcggataataacgcgaccgtatttagtcgtgtccggaaccattgttaccgagtttgtgaaggagctgtttttaagcagccactcacagaaaagcttgtgcccctccagagcgtactgcccacggaatccggcatcataaatagcgtgacactcaacaaccgaatgccagaaattacgcacctcatgaacaccggtgagaattaaaccctcatagattccgagataaacagcatccggctttatttggtaatgatcgccttcgtcgacaatgtttccggtattggtacggtcatcaaggaaagcgcgtaggcgatcaatgttatcgattagttttattttcatcagtcaatcagtccgtgtgagcgcagagcatcctcaagggcttttatgcgctgtcgtgcagcagtaagtccggaagacatcgcccgtacttctgattgcgtgtatgtggcgcttaccgtgtatgcctggctggcattaaacgcacctttcagcgccgacccggctgccgcagtgaagccggtaacacgactgcctaccaccttaacgccgctgaccttgtacgatgatgaggcagtaatatcgccgataacctgcaatttatccgtggttggagttaccgcattgccgataatgaatgaaccgccggcagactgaataacctggtcagtggcagcagacttcgacaccatgtcgccttcaatttcgacgacctttcctgtcaggtaatcaacatcactgcgcagtgtgactatctggccttctgccgtggtcaggcggacatcaagcaactgaattgcgttggtgttggccgtaatgcggagttcatggtcatcaacttctatccgtagctgctgaatgcggttctcatggtctgctagaactacgtcctgctcatcatttttaacctgcgcatcatatgccccctgaccggcctcatttgctttcccagtcaccctggtgaagtccagtgactgagacagcacatacatccggtaagcaggagaaaacacgacagggagcgacgcagcgttaattccgaccgccgttactgcaattgggtcttttaaactttcatcagccattattcagcccttactgtcaggtcagacaacgttaccggcgctttggttattaccctgattttgaacccgacatttttccggatgcggcctatccgcttccagataatgcgctggtcataacggaacggtgcattctgagagatcatctgctcgcggccgtaattaatgccgtcagtggtagccgacaggaataaccggtcagcaatctgagcaacgccggtcgatgcttcaagctcaaggtcaaacagtctggcgttatcggccttaatcagcggggtgtacagcaggtgctctgtctgcgcgtcatactgcgatgaggaattgaacaccagacgaccaacaacaggctgctttttgtcaccgacggttatctgattaccttcatacataaaatcaactgcccggtacggctcatcaaacaggccggttttcagcacagcccattgctggccgttctggcttgctgccgcgtcgaataccagtgcatgccgtggaaggtgaatgatcaacaattcgtgagagtcaaaccgtaccgactccatgatgccgccagataattcatcggcagtgtaaccgcgcagtatcttctcgatggttgccgtggcgatagatttaacctgaccggagtcaaccaggtaaacagacggtgcgccgctggccgggtggctgatgatagcgaacgcatccatatagttgcatttgcagaatgttccggcaatacccttgctgaccatgtatgacgggttagccatgtagagagcagcgccgacagttgtcgaaccggtaagcgtgaaatactcaatcgtggaagcgccgaagcacacaatgaagtcacgccacacgccgaggccgataatgccgtcaggttgcgactcagcacgatactgaccgctgtatttgtcagggtgagattcatcttcaaggtctgaaatgaaaaagctgtcagtgcctgctttcgaccacacataccggcctttaaccctggcaacgtcactcgcctcaccgagctcatactggatatatccggtatcgacaggccagttggtgatcgtcttttctccgccgtcatagcgatactgcgttattttcccaccggacaaaacagcctgactggttgcactgtatgccatcgatacgcgggatttgccggacacactgccgataacgctgtcaccgcgatacagcttgccgccgaggacacgatacacggcattcttcgccgtgttgtactggacgccacgcgacactccgtcagcatcacgaagcttttcgactccggggaatgaccgcatataaccggcagcattcaggacttctttcggtgttgctaacatattcaccggcagggtgtcgacataatcagcagtcctgaaatctttcgatagccccctagatatcggaacctgaatcttcggcattgtctttactccggtggaagtatcgatacccgttcatcgttgccagcctgtttcctgagccaatcgggaacccgttcgggtaatgcgatctggcctctctggccttgcgcaatgaaacagtgcgtaacaggcgctctttgccataacgggcagtggtgatgaccttatcgagcggggcaatctggtaatctggtgcaattcgtaatgcgaggttatagataacggcgctgatggctgctttgctgataccgtggtcgtcaccctgatcaatcggggtgtcgtctggtgcaaatttatagccggtaataatacctttgccgtcctcgtgccactcaaacatcattgcctcaagatcattaacgccatcctcaagagactgaggttcgatgtctgtcagtgtggcatcagaagcaacgccgattttacgaagcgccgcaacgactaattcacccttcgttagtatctgcatctttcaccgccttttttcgtgtggtgcgcggtttcttttctggctctggctctggctctggctctggctctggctctggctctggctctggctctggctctggctctggcagagtttgagtgtcttccgggtgcatataccagccagcgtcgagataattttcaatctcatcatcttcaaccgtgatgatttgcagcttcataccccaaattttcacattgccattggctttataaagcatcgtgctcattggtatctccaataaaaaggggagccgaagctcccaatgtgacaacgaggatttatttctgaccggtcagaccgataccgacagcttccggacgtttggtgcatgctgaataccacacagcaatacggcacttaccttcgagggtagaaatatccccctgataagcgacgacaccattcaggccgactgacgggatgttgaacgcctctgttttcatgccgctgaacagcgcatggttgagagggatcggctgggacagcagcgtaatagagtcgtcagcccagaagatgttagtcttggccgtcttaacgttaatgacgctgattgccgcacctgctgccagcgaagtgttaacgttggcatatgcgcgttcttccggcttcagtgctgcgtcatccagagcaataggtttcggcatgatggtgatgttgttgccatcaacaccaactaccgcaaacgttgcgtcctgagtgagcagatcttttgccatttgtgagatgaatttcacaccggcaaagctgattttgtcaccgcgcttgaatgctgacccgtcgcttactttcactactgcggtgcggttatcaacgttctcacggttgccgtcaacgtcctctttccacgcttcaggcttaaacttctgagcgccatcaactgtaacaccggtcgcagtcccggctgtcagcgttggcagtttaggggagcgaagaacatcgttaaatccggcaacctgcttctgaatggtgcctgatttatacgcctcttcaggaatgcggccatacatgtctttaccagccagagacatccccgcttttttgtagtcatcggcgttaaagaagtaactcagcccctgactacggttaagctcgcgctggaagatcagcgcttcggcatcagacatcatatcccaggctttgttttcaaccgccacgtggtcaacatcagtcacgatcagagatgcggtatcagcagcctgttttgcgatagatgtttcgatgttatttgccagcttcaggccggatgccttcatgcggcggcggatggatgtttcatcacgagtatcgtcagcgcgaagcgtgaagaagtcgttatcaggaacgcccatgttgcacttaacagacagttcaacaatacctgtcgccttgttggtcaagtcccagcctggctgagtcggtgcctcctgttctaccggcatccagattgtattctgagaccgctgtaagtcagcagcaggcggcgtgtatttgctgacacgctgagccatcgggcagttattttcgatagtgtttactacttcatccaccatataggtgatgatttgaccttcatttaaagccattatttaattccttgtaatttcgccttgatttggcggtaaagcgctacgtttccgtcactggctgctttctccatctgcttacgaagtccggcagcattagctgctgaaacatctccgcttaatggttcgtcagcaggcggtgcgtctgaacgctgtttaccgcgtggcgtgagagttaatcgttcagataagcgtgtcagctcaatgagtgcggactgcccgtccatcgccagaagttggcgagctttctccgggttcgagcccaggtaatacatgacagctgcggatttctcagggaacaggcgcatgatgtcagcgccaacctgcggcggcactaactgcatgaacgcatcttctttatcctgatagtcagggatgttgagtttctccgcagcgtcatagtgtttacgggcagcttccacatactgcgctgactgctgggtgtattcctgagtcttgcgcccctgctccgctaccgcattgcttcgtgcgtccatagccttcatctgccagtcactgttagcctgctggaaagcggctagtgcgcgattctggtcaaagtcatacttggcaagcgattcatcagagaagaaatcgttcggatcaggctgctttggtaactcaggattcacccgtaagtgctccggcaattcaccgcgttttactgcttccatctgctgctcaagttcacgctgacgcttgcgctcaatgcggcgacgggcaaattccgcgtttgttgccgggtcttgtttgggtttcccctcatcgtctttcagtacaatgtcgaagccttcttcctggcctgcgttgtcgttggcattatcgacaacggagccatctgcggatgccgccgcctgatcgccggacagggttaattcttcagtctggttctgaatttcggtggttgtgctcatgatatttaactctcttacatggtttgaggtatctcggctggtgagccggaagggatgttttgttgttgctgttctgcaaccttgctcagaagttcgatagctttcatcactgcgccctgctgcaagtcctcggccttagccagggtcaatgtagtgtttgcctgtgattcaagcgcgttattctgagcagtaaatgctttgatttgtgtttcctgcgcccttgtctgagcgctgacaagttcagcctcggctttcttctgctctgccatggctgcaatcatcatcgggtcttgcttgccctgctgagcctgctgcgcttccattaaccaccgctgttcttcatcagtctccggcttcttcaggccgttaactatcagctcgcggttagcgtagtcgcggatgtactcaacgcccttgccttccatcatgttggcataggtaagcatcatgacattccacataggatgctcaggagggaccttggttatcaggtcgcctatctcagcgcgggctgcatctttctgtgactggaatgacgggccgacatcagtgtacgtttcatacttgccgcggatgtcgtttttagtgacaacctgaccctgctggaagtcgacagtctgagacatcagctcaacgttgctttcattgccatcttcggcagtggtgacaacggttcgcgttgtgtcataaatctcactggcgattgatgcgtaaatctcaccatcgcgacgcatggcaattgccagattatcctgaaacacgtatgtctcaaggtcgatacgggagttaagctgattgacggtatcaaatgccacctgaccatttgcggcggacgggtcaacgccgatacgggcaacctcttttgctgcctgtgtggcagcgtcaagcattccggcatcagcaggcgatatctccggattctccatataggagaccgggccgggtggtaaatcctggctgttctcatccgttctgttcagaatgtaataggggtaatcatcatccccgctgtacatgtgttcataccctgcgatttgctcggcataaaagaacggctttttcttcggtgattttgctacagtatcagcgccctttgacaggatgaagttacgcagcctctgagcatctttagacaggcgtacaacgccctcatacagctcagtatcatcgaagaacgaccactcgccatacacgggcacaatcgggatatgctcaccggcaaccggaattttgtctttcagtatcgccgtgctggtgatgatggatttgtacaccctgcggcgcttaacttttcgctcacctgctttctcggcaccttcagctgacaggcgctcaatgtgatctttaatctcactggcgtaatagctctgaaagtccattactgtagggttgtagtagacgaataccttctcgtttttctcatcaacctcgtagtgttcagcgacataaattgttttgccgctcgaccaggtgaacaaccagtcagtgtttggcgactggaatgtcggaacatcgtcaggatctaacccgtattgctctgcgaattcttcccacccgtcaatattgagagcgtgaattatcgtgcagcgcttggcatcagatttatccatctccttcgcgttacagtcccatatcacatgggtgcatgactcatggatgggtttgcgccggataatttggttattgctggtcgggttatcgtcctcatactcggtgacaatgcgccaggcaccgacaccgcactcaatctgctcacggactgccacgttgacagaaatctttgagctgttattgcgcatgtctgtgcggtacatccccatgaggatgtcagcagcatcaggagaggctgtatctttcggtctgtactgaacctctatcggattcttgcgcatctcagcaacgagcttgcgcaccatagggcgcacgacatcgaactgcccgcgatactgcaatgtgacatagttttctaaccagtcatcccactgtgaaacgcgactgaaaaacaaatcattcctcgcctccgttcgtgctgcttcagacgcggagtaatcgaggtcgaatttgcgcaatatgctattcagccgctcatttttatcgaccattaatgtctcctgataggcttaatcggggcgggaattactttctgtttaaccttgccaatctcaccgaatcgtcttgcgaaccggcgcatcatgtatgcgtagcgggtggcatcaagcaggtcatctcttgtctttacaattttccctttctcgtcacgatggtagaagttgtattcctcaaaccaatcgcgcaatcctcggaaaactttaaacctgccggttctcatcaggtcgtatatctcaaacagcccagcttcaacagaccgtgatttatccggccactgtgctggctcattaagcattttaaaaccggcatcttcgtaatattctttctgttgcagacctgaacccttctctgtctgcaaaccatcctgaggccatgccgtaggaatgcctttagcccatgccttcaccgctccccacgcctcagatggtgatgtcttgcttgccttccatgccctggtgacataataggcatcattatcaaggtcgatagccaactgaacatgtgcttgcgggtgatcccagccaaagtccatgccattaataacaatccagtgttcagggacagggaacgggtcacaggttataaactcctcgccaaagtcataaatgcgcccatgaccaagcatagggatgcctttcgttcgcatatcacgctgatgaggtggaaacgaggcaagcaaatcctctttgactttttcgctaaggtgcggagcatcatcccagccgacgttcatgcaagcctgagccggtgacgggttatccatgaatccgataaccagatcagtccgtccgttctctggcgtaaatgtcagaatgccgcgcccacctctccccctgtcaccggtagcggtacgggtaagcacctgcgggtaaatcgtcgggtctttcggttcttcgtcgatgtggaaccaatcaacactgtcccccatcagggcatgttgcccctgcgagtacgaccagaactgtatttttgctatatccccgcttttatggcggatgtatgcagagcgaacagcgtttgctgcaccctgagcagcttcagtgctgattattctgtccccgggtatcaaaccaccttcccagccgttatctgttttacggccaaggattggagcctgtagcaggtcgcgacacttttcaccggagtagccaaggcaccagataagcggagcatggtcaaacctgtagccgtcccaattgtcagggtaatcacccatagcatgaatagcgtcgatgtatgtcgctgtgtctgttttgccgacacggttcgctgcaatgagtgctatctgtgaatactcgttactgagggcaatgaatttcttctgccacgggtaacgggtgtcgtaataggttttatatcggtagacggtggcgcggcgggctttttcttcaaggagccggagaagctcaattttctgctccctgtccattgcttagctccttaatgcgcttgtctatttcgtcgtcagttaaatcggtgatagttattttttgatcgtgctggatacggtcgccataacgcttaggcgccagcttggatgcataccacttgcgggcatcaacgcgaagacgtgacctagctacgcgctcatgatttgtctgttcctttccgtcatcatcaacaatcacatcaccggagctatcatcagctatttcaattatttcctcagccagcagctcagcttgaatctcgcgcgcacgcgcgtactgttgcataaagtcctcatgcctttgcaaccaatacatcacggtgcggattgctggcattccaggcctcttacaaattgaacgaaggctttcacccaacataagcaaattgcagatatcttcagcaacttcaggtatgtaatctgttgggcgacccatctttgccgtagtcgccatatatcccccttaatcaattatccagcccactcggaaatgagctgtgtaattggctatgcgaacaggtctaatgcttcctgcgcctctcttgctgccttttgtgctctggcaacaaactgcgattcagtctggcatttgtggtaagcgtctttgaaaagctcaaacttgagcgcatcgtctttaacgaactcgatagcggcctgagctgcggcggtgtcattacccaccagtcgtagtaagtccagacgcatctgatgctgtgctgtgatttctgtcatttttgcacctgtagtttttgagataagtgttatgtctctccatagtcacgccgtttcttctccggtggctgacgttgccactacgcaacatgaataaatgccggattcgttgttttcgactatcagcatgcgctcgtcacaaaaggaggatgagtcattgctaacacgctataccgcgacaacgctgcgcaaagtgctggttatttggagtcgtttacgtaatgggctaccgttttaccggcgctgttgatgatttctgctttgtcgccaggctgcaatgtgaggtcgtcaccgcagttattgtggtcggtgtaattcagcttatgcgcccacggtgaccactgaatgccataaccggactcaatgacttcgttacctgatgcggtggttactttgattgtgaacatgatgatgctccgttattgaatttggttcgcaaccatcatcacgcatcactacgttactttggtcacttccgtctgttccggcatgtcaagatagtgatcacctcctatcagagaagagctatctaaccttgtcggggttattcgtaaaaaagccccgctatttagcgaggccgaatggtcgtaattcacctattaattttgggaaatatccgaagttcataaaactaagtgatcgcattgttcctacccagggaaattgttcacctggccttacgtcactcagggagcacaccggataaatggtgtcttcattttcatcaaacgcaacttcctcggtggtgtaatgcggtatgaaaaacatcagccacttcatcgtaaacactccgttctgatgtagtcctgcaaatacagggtctgcttttcgttctcagccatcatttctctgagacgccaataatcttgttcagttgcttcactaagtcgtggggcggcttcattgcttccgctttcggtggtatcggctccgacctttggacactcggctttgatgtacacgcgcttagtgccagacttaacagcatcacgcaggctatcaatttcagtttttgcattggttaactcctgcgtgtacatggtgtcgagttcgtgaagtgactgaatacgggatttgtagtctttgttgatggcgacctgttcagtaaactgagaggaaagcagctgatagttatccttcagcccaccatacagatgcaggagaagcatcagactgatagccagtattccgcaaacgccgaaccatatctttgttgcggtgctcatgccggaatctcaacgtgaggcgcatcaatgaaacgggtttcaatcggcagtgatggatcattcttccagttgatgccgaaccggagctttacacccaactcatcagcagcctgtttaaccgctttcagcagcggcttgaattcttcaatctgccacttggtgttaaccggaataatgtctactgcatggccggtcagatgtcggctgttatttgtttgtgatttacccgccgcgaccaattctttttggcgagcctgtgtgcgcagaccttcaatcacgatgaaatctaccggtgtaatctccagcgcgcgacgaatcaccttcaccaagtcggaattaacacccttcaggttattctcgcttcgctgactgaatcggaatttgctcattttttaccgcctgagaattttgaccaaaagaagtccagtgcaaaagaacccatagcgccacacataccggcagcaaataccgtgtaataaaacgaagcgttgagttccacagaaagcagcccgcccatcaggccggagaacccggaaaccatcatctgcatgattgcccccagccagctccagcggtagccgttgcgtttgttgtcaataatgtaccgggctaagccaccgtaaagggatatggcaaatatgacaccccatgctgtaccggtgactttcaggtctttgtcatccatctttgccataccgcccccttccggaggatttagttaatagggtgccgcgcacagtatctctgcgctgattacgtttgtttgttcaggattctgtggcggcgtaaacgaaaaaaccccgccggttggcagggttcttttgaaatgatcataagttgatcatttgattgatctttttttgttcggtcaggtataatgaccgaatatcttgtgttcttgtgagagagaatgcactagatatagaagcgcccctgtgtagtgtcgagctacagaggggcataacaaaactgcagggtgttacatgtgatcaccttttcagtctagtttacctggtgatctgtgtaaagccctgaaatgcatacagggtttaaactgatgaacaaaaatatctgtaaacacgctcaccgatacgactattcatttctgtatctggctgataatcaaggccagacaggaagacacaaatgctcaggatgtgcatatgaattaggtcgacatcacgctctcgttggagcaccaaaagcacaaaatgactctgttctggagcataccccagatagccaggcaggcacagtacgtcacaaagatgcttttgaggcatacctccttggttatgattcagtaaccggagcaacagcgagacagattgcgtaaacagaaatcacatcaaggctacttcggtagccttttttattgcctgaaggccgcaaatagcgacctttggaatcagttgttcggaataaccgaacatgtgaactatccggaaattccggagagttgaacctgtaagtaactcttacaagttgcagatacgaaaaagccctccggagagggctgttatgcatgcttcggcacaaggccggtttcccgccggtgtgcgccgtttacttacttcctcgctctgcattctttcgacctctcagccgatgcggttcgagtcccagccctgcggcgaagtgacgaactaggcggtatcgataacaggagccgcctctgtgaccctgttacctgctcttgcttttaactgcctgagcatatcacaaactatacagactttaggcgcaaagtataatagttttctcctattaattataatcacaggtaaataatactactaattaccgatcactgtggaataaatcacatcttcaatgatggtatcagcccatctaaccctgcgctttgctgagtcagtatctatccccgtctctctggataatgattcgagaacattttgcgggcttttgcggttcttatatcgtttaataaccacatcacgaagcggattatttagaggaaaggctttgttgatacaggattcaacggcatcggcgtcatctttttctttggcgagtcgaagtgcgccgagcgttgatttgtttggtgatacaatctcctttaccttttccagtagctcgttgccggaatatccctgttttttgcagttaccaatggtcacgcggatcagggtggcagtttcatcatcccactcgtcacgcgacatcagctttccgataatgtttattccgcaatcaccaggtgcctcatccccgcggtagtgcattccccataaagtgagaaggtatcttgcctgcggtctgtccgatttctttatcttccctactgagccgccccacttatccctgagctgcttttcagtcctgaagcatgacaaatctctgaatgaacctcttttcatcgccctctcccctggttgcccttcatcttggattttgtcatcagcacgccgttgtagataacgtgcatttcacaccgggtatcacggtgaaacttcctgactgtatgccggtttattcccagctcgctcgccagtgcggtcatgtttccgtggtgcttaaccagcatttccggtatcgatgtgatttcaggtttcatcccctatctcccatatcgtgacatccagtgacccgccgcttaccctttcaccgcgcctgatccgcatatcatcaatctggctatcgtccttccagaaaccggcgtgagtgagcgaatcgaaaacagcctttggcaggttatcgaggtctctctgtcgtttgtccggggggtttgctgtgatactgattctgatgcgggatgtggtgctgatatcgaggttttgctgtctgattaactctgtgatgtgttgccggtatctggttcctttctctgcgatgtagtgcctacctctggcatgtcgccagtacgtgtttagcgatggcgggtacggtaacttaaagtgatattgattcatgccgatattttcccctctgccagcagctgcgcctgagtccggataacaccctcaaggtgacactgttttgcatactcagcgtctgtgagtcgtgtacgtcgatctgtttcgtcatggcacgcactgcacgcccatgcgccaaaaatgtccggtgacttaattccggtaccgcacaatcccggcatccgataatgagccagcaccacagtttcagaattgccgttgcacactcccggaattcggatctggcattctctgccgcgcgcttcttttcgtagatttgccacatttcacctcacgataaactgatgccgatagccagaacgaacaacacccagcacaacacgaacgggatatatttacgcatatcaatactccaatcgactgtcgtttttaagttcatgctgagcacagaatgcctgccagtttttatctaatgttttatctgaaaacttaattctgcatttgcgtccgctattaatcgcaacaaacgaactgttctttgatagcgcctgttttctaaattcctcagcgaccggcacaagaacgaaataaagatattcaacacccatcaccatctccctttatcttctcgactacttcaagatgcgggcattcgttggcgcactggtcgcacagccatgtttcatcgtcggccagttctttactgcatagttggcattccacggcgtacctcccgcagcattgcgtcaatttcattgatgaacgaccacccgaacccaggctcaaacggacgggttctggattttggacgcgacgctttctccttgactaccgtcatccttgccttagctaccggagtaggcttttcggccaggctgctgaaatgcgccctgactttggatgccgcacggtcatcaaaagcgtaataaacctgactgcctttcctgtgcacggcgtggacactgccgatatcctgcaacagccggacaaatttagcgtctatcatgctgccaagaccggtggcctgcgcaaccatcctgaccgtgaaggtgtcatggtggcgaagtgaccggattattttcaggcacatatcctgcttctgctcattggtgtgaaggtattgtcgtgtcatgcgtcctgctcccttttgagtttcatgtactccgagttttccggtatcgtcacaaaacaaccgatgcctgtagcccagcgttcaacctgccccatgaagtggaacatttccccggcgtctaactttgatgtttttctcatagtcctcacgcgctctgtatgctgtgtggtggcatctatcatttcagtgacctcgtagcccaggaatgtatgcttaagcatttccttgactgtctcaggcgtgaatttagaaccgttgtcacacagatacttgcttatctcaccgcaccacatatgaaacgtggcgttctgagatagggagcgggtagatttccagggcttgatgattactcggtggggtttgtttgttgctagtgcttctttgaggtgttgccaggctgcatctttggttgtttcgtggaagagaaattctgcttccatttagcctcctatgctttctttcctcggttcacgaaccattcgacggcatcgcatatttgcttatcctcataccagtcttcaatccatctggattcgtatttatcccggaaaaacatcggaccgcagtatggatgccaggtcatgaagatatagcgtccgtcattcagccttagccggtacatgcgataacgggcaatgtgaataatgttcataatttcccctcgctatgcagtggcaaccaaatccagcggtgaacaaatggcacgaaatgagacaggaattcccatgtttgcgattccttaaatccggtcgtttcatcaaccatgtcaaccagagggttgctgcttttgcgtggcaacgatacgttgtacaggcgctggaattgctcaacaaattcgtcagtggctaggcattcttctaccacttcaacaaataccggatgttccgctatcgtgcgccggatttcgtctggtaatttgtgaggcttaagcttctgtgttttctctgtcatttgaacctcattaaccagccggtaatgttcccgtcgatgatttcggtgtgcttcactttttgcgctctcctgcaaataacgtatgtagccacaccataaaccggataaataaacggcgttgtcactgcaatgaaaatcatggttaacaatgtgatagcagtgaatggcatctctctgatttcagtatccagccagaaaagccaattgtaactcttcatgcattcgacatatttatgcgccgtaaacgccatgcagtcgaagaaattgaagtcataccctgccgctgccgcatacgctggtctgtcaaaaaagtgcctgagagtcactgggtattgtttgaaatacttcatcactcctccggtggcggtgtctggtacggcagtctgctgagaactccggccatgtaggcgcggtatcttttcgcaatctcaccatgtttgtattcatggccgccgaaaaaatttattttccgctgcatcatgatccactccggcgtatagccaagttcacccgcacaccacttttcaaaatccgttggttccataatcaggattcctccgtgctctatccgcgaacccgcgttgctgttctgatattttcgtatgcctcaaatgcctccatgcgctcaataccgtcacactcttttgcataggcatacatggcctgctcagcttcacggtgtttttccagtgcaatgcgttttaattctgcgagttgttctgtagtcataatcaaaagtccttctgtcttgggttatgccgtcacacgtccgcgcctttgaatctgcgctgtgctggctggttgctttgctgacaaatatttgcggccatagcctggtccgtatcgagaaagtgcccgtctttgaatagctgatacacggtccctaatttaccgaaccggttttttgtcacgatgatttcagcgtaattagcggcaggcgagttttcgttatacaccccgtcccggtacagcatgatgatggcatccgcatcctgttcaacgcttcctgaatcgcgaaggtccgcattcgtcgggcgcttgtttggacgtttttccacatcacgggatagttgactgagagaaataacaggggtccgcaggtccttagccattgctttcaggcttgctgaaatatgaccaatagccaggtcattacgctctgcctttggtttttcaatcaggccgaggtagtcgacaaggatgagagataaattcggattggcccgtttgtgccgacctgatatcgcacggatttgctcgaccgttaatttactggcatcgacaacccacacatcaagatccactatgcggcccataccgactgtcacctttgtccagtcttcctggtccatcttcgccggattgcgcagggatgaaaccggcatgcttgcggcccctgcaatctgacgctcgataatctgctgagagtccatttccattgagaaaatcaaaacgcctttcttctggctagtcccgcgaatggtctgtgaagcaacgcccttggttattctcagtgccagctctgtcttacccataccgggccgggccgcaacaataaccaggtcaacagggtttatcccgccggtaatatcatcaaggtcagggataccggttttcagcgtgtcagactcatcaccattctggacccgcttttcaagcatctgcgcgtagtcttcggctatttccttcaggtgaacgggccggatctcatcctgcggggcccgtatttcagatgcctttgccagaaactggtccattgcctcagttgctgcgtcgacggtcccgtgttcgatttgtccgcgcacagagtccatcagctcaatcatcttccggcggcagtgaaggtccataaccatcttcgcgtagcctttcaggttggcggcgctcgggcagtttttcgcggcttccatcacgttgctgaactgatcacccatttcctcggcaaccatcagaacgtcaatcagaccacgggccttcgcctgcttcctgataacctcataggtcctgcggcaaaatccggacccgaagaattcaggctccatcgtggcgagaacatcactggcatcctgtgttaacccgctaatcagcagaccgccgataacactcgattcaacttcaaaattaatcacgactacctccctgtgagacttggttttccttctcggaccgctgtgagcgtgtcttccttcagcagatactcgatgtcggccgtccatccgcgatcaccttccccgaagtaaaacgggcttgccagtctgacgaacgccctgacgtatgagcgccagccgtcgacgtttggagtcgccagtttcggaattattttcttcaggttacgttttcgcttctcagtgacatcgatggcgtgaggcaggcgatcgccgacttcctcgttgtaggcaatgagatattcgtcgtaattgattttcactgcccggcgctttttaggtttaaccagcccttccacttcacccccaacgggggtatgggggttagtttctttcttttcttttgtaatagtttcttttgtgtgactctgttttggtgacagcgctgtcaccgttttggtgacactttttgtcactgttttggtgacattgtcaccagagtagtgacaccctgttatttcccactcactcacgttcttgtttggtccgattctcggtccatccataacgactacacgcattgctatcagctcgtttttcgccttgttaactttctgccgtggcaggtttgtcagctcacttaactgactgtcagcaatgcggtccgacttcttgccaaagccataagttttccggcaaatggcgtgtgctaccttggcctgattttttgttaagtcagcgcctatcagggcctcatacagagcatttgcaagtctggtgtacccatcatcaagatctgccaccgttggcctctcttgccgtcgtgcggctccaaagtcagcgtatgcaacgttactgttcatgccgtttacctccggtgatttcctgtcggtgttcaaggcgtaatttcgcatcatcaaatgctgccctgagtgcctttgctccctgctccgttacggctctcgcctcacgttcccgcatgatgtttttgtgcacagcgctgtaattaaaccgttgtttcatgtataattactccagtgtgtgatttactaatgcgcctctgctgctccaacagccggggcgttttcttttgttctcatcagagagagttcgccgatctgcttccacagaaaccggtactcttcctcgctgattttcttctcgcctggcaaaacaaaatctgtgataccggctgcggccaatgtctcgcatatctccggtaacttttctgttctgcgtaagactgttgaatcgtgtacaccgagcagttttgcaaccactgtctgtgtggtgcttctcagtgcctgatgagcggttgtcatcagatgatttgacacaaaccggttgaacgatttgcgtggatttgcattttccataattcataatgtccttattgagatacagttattcgcacacttcctgtgaggtgttgctgtgttgaaaaatgttccagcacatatccggaacgggctaaattgtgtaaagagcggttggcttaattgtttttacctgatgggaaagtttttacttcttctgcttcaactgtcccgtcctgctttttgatcacatagatgtttcgtttttttaaaatcgccttactgattgcactctgtctaacaccaagcatttctgccgttttgtgttgaccaacctcagtggcgaatgttgtaagcgggattctttccatgcttcctccttttttattaattatcaccgctagtgataaaatagtcaacacctgcggtgattggtaaatattccaattggtaataaaatcacctcatgaaaaagaaacctctcactgatgaacaagtagccgacgctatgcggctaaaggcgatttttgacgctaaaaagaaagagcttgggctgtcccaagagtctcttggtgaagctattggcatggggcagagcgccgttgctcaattgctgaatggggttaacgcgatcaatgcagagaatgcagcaaagcttgctgtagctcttgacgtgtcagttgatgattttagcccgtccctttcaaaagaaataagggccatgtataacgccttggcatcgcaaaaatcaaaatccgccagcgatagatattcatacccgcttttcaccaaagttcaggctggatgctttactgaaaacggaaactcatacacagacagggatgctgaagattggattcctacagcaaagaaagccagtaataaagcattttggctagaggttgaagggcattccatgactgccccgcagggcgggaaaccaagcttcccggaaggtatgctgatacttgttgaccctgaagaggatgttgagttcggggatttctgtgtggctcgcatgctaaacgatgagttcacgtttaagcgactgatcagggatggtggcattgaatatttagagccactaaacccccgttatgagctgataactatcaacggcaactgccagatagtgggaaaagtggttaagtcacagtggcctgacgacacgttttagggtgtggtgatataaaaacataatgtgctttagatatatggataactttatgcaaaatttagacaatgcattacaaggatttataacatataacattgatgaatttaagaaaaaacactttcctgatgctgacatggtatcttactatggtggaataaatttctggtctaaacattcattccagccagtggtgtcttttcttggtaaagaagcaagaaaaagaagagtaaaaaaattggtgattctacttcagacaactgggggaagtgtagagtctgttgaaaaactagttgaaataactagatatttttatgatgaggtgtattttataatccctgattttgctatgtccgccggtacaatatggtgcatgtcaggtgataaaatctatatggactacgcatcatcgctaggccctatagacccacaagtcgccaacccagaaaaccaatgggttccagcgttagggtatttagacaaagttgaagaaattataaaaaaatccgagcagggaatggttactcaagcagagctaatgatgctcaaccgactcgaccttgcagagctacgaagatatgaggaagcaagagagttatccaaagaactcttgaaaaagtggctggttgattataaatttaaagaatggaatcacaaagagagctcaggtgaagctgtcagctaccaagataaggtcgacagagcagaagagatagctatactactatctgacaataaacgatggcactcacatggccgctcaattggtatcaaaactataattgatactttaagattaaaagttgaagattactcagacgatgaagatttttcgtctggaattattaacatacacaatttattgcttcagtttgcaatgaaatcaaatcaagaaatagttgtcatagggtcaacaccgtttttcgatgatgaagcccaacaactggagacggaagatgaacaaggctactaactcaaaaatcattactaatgtcatgtctataagaaatagagaaataaatgaaagacaagtaaagatgattaatgatcttgatgctatgggattactggttaccccttctttcaatctcaaatgctctccatctgcatatttccagcctagaagtaactagaacccacgcaaaatatcaagaagccctccccgcgagggcttttttgtgcctgcaattcccccgcctgtgtgatctgcgtccaatcgtgacgattttttgaaaataaattatccaataaatcaatagaataacaccgccagtaatttaattatcacctgcggtgttgacttaattatcaccgctggttatatttatcccatcaacggcacggagccaaagataaacggacttagctcttttacaatcgggaacctgatctgaataagtgtcagatcaccactgagtggtttttggggtgtggttaagctgaaccagacgcaagcaaggccaatagcatgcggttcaagtccgcggcggggtctgcaagctgttaacaatcaaacaaagtgagattgttagcgtaaaggcgagcaggcgccagaggatgcaagcaagactgacaagacggtttgaggccgatagccactgactacaccaccaaaaattactcaggaggcaatatggcaacaattactgttattccaaagaaagacaacgcgaagaaccgccggttagcaaagcaaatggcgttctgggacagaaagcgtgaggagtatgcagcgaagcctaaaagccgctcagtggaggagatttttgattcagttttcggccgaccggcagacgaaacagatgtgtttgcagagctgattatcaggctgaaagatgcaccagaaacaccacgcaagcagctgagaatgaaccgcaagccgattatgccgaacggtggcattacggcaagggcatgaagcgcagatactaattatagcccattcggtgagtgggctatggtgagttaataacaggagatggatatgaaatttgaagagttaccaatcgatgcaagagctgccgcgatagaggcatacaagcaaatcgttattcgcgaaattggagctgttgaggcggattacgccaaagaccaaaaagccagatgtgaaaatctggctgaaacaatagctgccggttttatcaaaatgatggaaagttaatttattccttttttgacttttcaatttttgacaattctacaaagcaatcctttattttttcaaaagcaacaacaaacgacccacccttatccgagcttccattaaaagcaccagctctagccagttcgataactgcctgatgtgcggcctcgattggataatattccaaattaactaatttttctgacatataaacattccttattttgactgtggaatgttcaggctaccagattctttggctgtggaagttgaagatagtcgcaagactgacagcccggaaagacgggcatccagtcagtattgggattggtgaatgcgaaggcggttggatatttgaggccatgtagccagcgtatgtgcggggattccgccaccaatcaccaatactgactaacaccccgcagcggggataactattcggacatcacgtagcacagggaagtgcataggaggaagtaacatgccgatgtttaaagtaacgtgcaaatggaacggaaagccatgggaaaaggatatcgaggccgaggatgaggccgactgtacagaacacatgtatctgtttggtgtactgattggcaaagccgatattcaagacctgcaaataacagagataaaggagaaaaacaatgtcaggacatccacatgctgaccttatggctaaggcagcagagatagcgaagacggatcagtattggcagcggaactttgaggaaaaatttcacagcacggataagtggaatcaaatgtcagatgtgttctttcaaacacacaaagaataccggctgaaacccaacttcatcgacattaacgggcataaggttccggagccagtgcgggaaccgcttaaaatcgggcaggtgtattggttggcacgtatacatggtgccgttgatagcttcgagtgggagggtgaccacgaatgcagagcctggcttgagtgcggactcatccacctaaccaaagaagccgcagaagcccacgcagccgccctgttctctttcacacagaagtaacccaccctataaataaacggagttaattatggccgataacaacggttggattagcgttaatgagcgcctgcctgaaatcagagatgattctgcactggcttactggcaagggaatggcggcatggatatggttcatgttggagatttttttggtgacataaccaatggccgcgacgaaaacggaaaccaaaaatacaccaagctttatctaagccatggaataactcactggcaacctatgccagaggcaccaaccaagtaaccccccccttatcccacctcgggatatcagcaggtaatcacatgactatcaatcagaacgttttccgtctggcgcaagcacaggcgcgggtagctatacgccagaaatgcgatgacatctggtggttagcaatggaattactcagagaaagttacgggaggcaggcatgcacaagataactatcgaatcaaaacacctgacgacaagcactgagcaggcaggatgcggaaatcagcgcgccgtcatttattttgaccgtaattcgagcgtggaaacaatggacgttgaaacgcttatcttgctgcttaatccggagaaggaaaccctggaaaagatactcagggaacgatacggggaggcagcatgaacgcatacgcagcacaggatgctcaggaagagcggcggctggagcatgcagcatggcaggatgccgtggacacggaagttcagcagataacatcggatgttttctttggtgtggagcagtcaattttagacaaattcagtgacgatgcgcaggacgcgctttttaactcgctgtgcaaacaaataaaaaggagattcttttcatgagtaactcactggtgtcgatggctggttctctcgcccaaaagcttgatctggcaatcgacgagaaagacctgattaacacactgcggtctacggcattcaaggctgaggccacagaccagcagtttcttgcgcttctcattgtcgccaatcagtacaacctgaacccatggacaaaagagatttacgctttcccggacaggacgggaatcgttcctgttgtcggcgttgatggatgggcgaggatcattaacggcaacaaaaattttgacggcatggaattcgaaatggatgacgaatcgtgcacatgcaaaatttaccgcaaagaccggaatcacccgacatcagtaacggaatacatgagtgaatgtaatcgcggaacccagccgtggaaatctcaccctaaacgcatgctgcggcataaagccatgattcaatgtgcacgtctggcatttgggtttgctggaatttacgaccaggacgaagcagagcgcatcacagaaaatacaccggctggggttatcaacggacaggagagccatgaaaaccggcctgagctcatcgcacgctgtgaagaggctgcaaaaaacggaatggaagcatttaagcatctatggacagagcttactcccgaagaaaggacaatcgtcgggtcagcagataaagagcggataaaaaacagtatcgccattgatgccgaatacactgaggtgacagatggagcagagaacggatgagtggtttgcggccaggctagggaaagtcacggcaagcaatattgcaaaagtaatggcgaaaggcggcggagcgacaaggaagaattatatggctcagctggtttgcgaaacactgacaggtcagaaggaagagagctttaaatcagcaagcatggagcgtggtaacgagctcgaggcggtggcaagggaaatgtactgcctcaacgaattcgatgccacggtaacggaaaccggctttattccgcaccccgccattgagtttttcggagccagcccggacggacttgtaaacgatgacggattaatcgaaatcaagtgcccgaacacagcaactcatattgagaccataaaaaccggaaagccaaagcgtgaatacatccttcagatgcacggacagatgatgtgcaccggtcgaaggtggtgtgactttgtcagctatgataaccggcttcctgaaaatctcgcctatttcaaaacacggattgtttttgatgaaggccttgccagtgaaatagaaacggaaattcgcgaattcacgaaagagctcagggaagaaatcgagtttttaaccaaataaccccaccgtttcaggatgaagcgtaatgcagggatgctgataacagaggaatgaatatgaaagacagaatcaaattcagcgacgaaatgttggccgctgttattgctggaaggaagacgcagacgcggcgactgatgaagcctcagccggtattgaacggaaacttctatgaggtctttggcgcgggctggagcaaaggtatcaagcgcgttactgtcgcaccgggtcacagtttagagtgaaactttccgtatggtctggttgataaaaaaatcccgttcgcagacaaagacggcaacatcaaaggggaaattaagattgtcgatgtctggttacagcgggtgcaggagatatcacaggaagatgctcacgccgagggatttgaacttaccggctggattccgacttatagcgacccagatagcggcggcgagcaatttacaccagtcgataacttcgttgaggcgtggattgatatttatagtgaagaaagttggataaataatgaatgggtgtgggttattaagttcgtaaaactgaatgattagctcagatcaactaaactaaaagtggtatggtgatatctccaccacaaaggagataaaagatggttaattatgttttaatatataaagacggaaatatagataaaaaagagcttgctgagtacaaagaaaatgagtttagattaccagcaaaacctgtgttattcgcatcaaataatccacctgaaagctatgacttacctaaaacattcacctcacaaaaaataagtgacgatgagggaaatcaatatgctatagcttatgagactggtgccagttcagtgccaatggaagaaataatagagtatataaaacgagagagaataccttgtttataaaaacaattaccaccctgcactagcagggttttttatacctaaaattcagagctaaccatgacaatcggatttgtattactactggtaatgcacggctctgctgtgcctgttaccgatgatatttatacgctcgaagaatgtgagagccgcgcagtgcagatgatgactgtgcggaatgttgaattagtgtgtgcggaggttttcagatgagacaaattaaaataagctctggtgcgtggcaaaaagatttagagatggtcgtcactgttatcgatgaggataaatttaaaactcagtgtgagcaagttaataaattttattgtgatgcagagtatagagctaagaaacatggaagccatgaaaaggcgggtttcgccatgttctgtgctgagtgttttcagcaaatagcattcaataattttaaagatgaagaatggctgaccgagcaattcgactggtctaaagataaaggaattgaaggttatccttcgttagacgatatgggtattcgaattgatgaaattgagtcatggtttattgattatgacgaaattcaaattacaggatggtaatcaatgaacaaatatagtgacaaatcagactttgagattaataaggccgtggctattgcgagcggccataaagttatgtcgtgcgaagaatcagtcatggcatacattgatagcgggtataagccattcgacccctgcaacaacccggcagatgcatggtctattattttaaaaaacagaatcagcattatcattccagggaatgaatatagtgatggttacagcactccatttgctgcaagcggatttgatgatgtttctcattacatattatacggatgaggaatcattcaatcaaaacccattacgtgccgctatggaagtatttctgatgatgaaggatgcggagaatgaaagctgactacggcgggagcacaacaccaaaggaattgcgtgatttgtggcaaactcccctcccgttattttcagcattggacgctgaattcggtttttaccttgatgccgccgccgataaaaataataccctctgctctcattacctcacagaaaaagacaacgcattagactccgactggcaaagctacggctcaatatggtgcaacccgccttacagtaatatcttgccgtgggtaagcaaagccgcagaacaatgcaaggtgcaattgcaaccggtcgtgatgctggttccggcagatacttcagtgggttggtttaaatcggcactggataccgttgatgaagtcagatttattaccggtggccggatatcgtttattaacgccggcacaaacaaaccggtgaacggaaacaataaaggctccatgcttttaatatggcgtccgttcacccagccacgccggataatcaccacagttaaccgtgatgacctgatggatatcggcaaccggttactggaagcacgaatctgaggtgaccaatgacaccacaggaagcagagaacggacgcagacgaatagcaagggaatgcctgaaagaattaatgcagcacacatcagacgaacaacacaccgcaatactcgacaaatacacaccgaaatttaaaccacttaatcacctgcgctttccggcaaagagagtgctcgggtattacgtgcgtacgttacagaaggagatgaaggatggataaagtcacgatgacacgcgacgaggccgctaaatttatcggcgtaagccctgatacgcttacgtcatggtgccgcgccggacgcatttcgtatcagcgtaaagacccgttcaaaaagaagtcaccctatctgtttacagagtcagcctgccttgcggcactgagtaatccgatcaacactatcgccgagagcgagattgatgtgaaaggagatcacaaatgtcaatcttcaaacgtggtaactcttggtattgcgacttcgcgacacctggcggcaagagaattaaaaagtcgcttggtacgtcagacaagaagcaagcccaggagctgcacgacaaattaaaggccgagcaatggcgaattgagcaggtaggggacttcccggactatacctatgaggaagcctgcctgcgatggcttgaggaaaaagcagataaaaaatcgatagaggacgataagaactttatcgctttctggcttgagtacttcgagggtgtccggctgaaggatatcaccgagaatgccatctacaagatcatcagcaagatgacaaacaagcatgctgaaaactgctggagaaggaaggtcgacacagcaaaaaggaagggaaaggaggtgccgctgtttacagcgaagcctgtcacgacggccacaaaggcgcgatacctttctttcattaaggcgctgctcagagcggcggaaagagaatggaagtggatagaaaagtcacctgtgataaaaatcccctctattcgtgatcgtagagtccggtggcttgagcctgtcgaggcgaaaaggctgattgatgaatgtccggagcctttaaagtcagtcgtcaggtttgcgctgtcaaccggactgcgtcggtcgaacatacttaaccttgggtggcagcagatagacatgcagcggaaagtggcatggatttaccctgaagacagtaaatcaggcaaagcaattggtgtagccctgaacgataccgcatgcagggttttgcgcagccagattggtcgccatcacaaatgggtatttgtccacactgaaccgtcatacaggaatgacgggacaccggttgcggcagtaagaaagatgaggacggattctaataccgcatggagagcagcattaaaaagagccggtatcgacgatttccgtttccatgacctgagacacacctgggcaagctggctgatccagtctggcgttccgctttcagtgttgcaggaaatgggcgggtgggagtcgatagaaatggtgcgcagatatgcccatctggcaccaaatcatcttaccgaacatgcgaagcaaatagatgccatttttgacagttacgtcccaaatacgtcccaaggtgaaaaactggcatcgggagataatcgctaactctttgataagtaatggtgccggataccggattcgaactggtgaccttttcattacgaatgaactgctctgccaactgagctaatccggcacggcattattacactcctgcccggcagggttttcaagctgaaaaccggaaatctctgccgctttgcctgatttttcttctttattcataccttccttgcgtgatctgaagcacaaattcgttattttccgttttcagcgggcggttgctgattcttcatgaaatcgtgtctgtctctgtaaatcactccggataccatcaaagatgaataacctgacaacaagaacttgattctaattattaactgatattaatatgtattatggatttaaatgccagataaatagaatatattagcgttaaatttcaataacaagacccggggaaatatgtatatcacacacatcctgttactattcacccgctgataatgtaaacatttaagtacagcgttttgctttactaacatgactgtaaatgcgaaaccgtgaatatgatcactaaacaaccacataccggaatgcataacaattcactgctttaattaaatatctttgttattccctgctgtcgcttacttttcattcatgtaacgtaacattatcaatgtgatctttatcatcaaatttatcctgactgtgtcacatttttatttttatcccaggtttcagttgaaggattcaataaatcataacgtttttccgtacgatcaataaaaacaaagatgattataacaattgttacttataagatattttaacttaaattaccgtaccagtgcatctgatgcatagtttttgttaaaaaagaacaagacttctcatccgtttttttattcttcctgtaaagatagatttaaatttgtacgtttaacccttatttactttttcttaacctatataaaatcccacagaataaaatggcttttcattgcagcataactgcccgacagcattgaattattcatattactcccggattttaacgatgaggtaaatgtatatttaacataaatacacaacaagacattaacaaatacaattcattgaatataatgaattatttcagtttaagtgatacagatcacccggtttacacctgtgattaatacggattttatttatttcagccccccccattcccttttcattttttttcacgcatgatgatttcacgccaaacgagaaggatggcagagaaagaaataacagaaataaaaaaactgaatttgaattaagacaagaacactaccggatttacaaatgttatatcattcacaaggcatgatacttataaacagataaatgcctgtgtaaattatcgagttattattataaataattggagattttaccatgatgtatccagcagaaccgtatcgtattaaaagtgttgaaaccgtatccatgatccctcgcgaagagcgtatcaaaagaatgaaagaggccgggtacaacactttcttgttgaattccaaagacgtttatgtcgatttactgaccgatagcggcaccaacgccatgtccgataaacaatgggccggcatgatgatgggtgacgaagcatacgcgggcagcgaaaacttcttccatctggaaagaactgttcaggaattattcggctttaaacacatcgttcctactcaccagggccgcggtgcagagaacttactctcttcattagctatcaaaccgggtcagtatgttgcaggtaacatgtacttcaccaccacccgttatcaccaggaaaaaaatggtgcgacattcatcgatatcgtccgcgatgaagctcacgatgcgggcctggatgtgaaattcaaaggcaacatcgacattaaaaaactggaaaaactgattgctgagaaaggcgcggaaaatatcgcttatatctgtctggcggtaaccgtaaacctggcaggtggtcagccggtctctatggcaaacatgcgtgaagtccgccagttatgtgataagcacggcatcaaagtgttctacgatgcgacccgctgtgtggaaaacgcctacttcatcaaagagcaggaagaaggcttcgaagatgtctccattaaagacatcgttcacgaaatgttcagctacgctgacggttgtaccatgagtggtaaaaaagactgtctggtgaacatcggtggtttcctgtgtatgaacgacgacgacatgttctctgctgcacgtgaactggttgtggtttatgaagggatgccttcttacggtggtctggccggtcgtgatatggaagcgatggctattggtttacgcgaagcgatgcagttcgaatacatcgagcaccgcgtcaagcaggttcgttacctgggcgaaaaactgaaagctgccggtgtaccgattgttgagccggtcggcggccacgcagtattcctcgatgcacgccgtttctgcccgcatctgacccaggatgagttcccggcacagagcctggcagccagcatctacatggaaaccggtgtacgttctatggagcgcggtattatctccgcaggccgtaacaaagaaaccggcgaccatcaccgtccgaagctggaaaccgttcgtctgactattcctcgtcgtgtatacacctatgcacacatggatctggttgctgacggtattatcaaactgttcaaacacaaagaagacattaaagggctgaagttcgtatacgagccgaagcagttacgcttcttcactgcacgctttgattacgtgtaattatctgatgacagaggcctcattattttaatggggcctttttgtctctgcatccctataacaataaagaacaaataaaatcgataaatatgaatgctgttggtgatatttatcattaataggaaacttttattatgagtattcatagtgccgatacaaataaatcacccggactgaccagcggaaccatgcttgttatagcaacagtcgttggcggcggtatgttttctttgccgattgcgatggccggtgtctggttttccggtgccaccgttattttgattttagttgcaattatgatgttactgaccggtctgatgttagttgaagttaacctgcattttgaaccgggcgccagctttaataccttcaccaccgagttactgggcaaaaaatggaatattgtcgtgggtattgccttcgggtttgtactctatattctgacgtatgcctatatatccgggtcatccgctgttctgactcagacgatattaaaatataccggtgtcgccctgccgataaaagccgcggtcgtgattgtcgcctgtctggtggctgcgattgtctggtacagctcattatgggtcggacgtattaccaccattttaattttcggtaagtttatcgcgttctttgccaccttctccggactggttgcacacgtggaaattgccaatctgctggattccgcatcagtggcaatacccggaacgaaatatctgccttatgttctgatgacactgccgttctgtattatttcgtttggcttccacggtaacgtgccgagcttggtgaagttgtacggcaaaaccaaattccgctttattacccgttcaattattatcgggacaatatttgcggtactgctgtatatcttctggctgggtgtcacgatgggcaatatcagccgtgccaacttctctccgattattgccaaaggcgggaacattgatgtgttcgttgaggctatcggcggggtgatgtcagggaaaaccatggatcttatcctgacattcttcggtaactttgcggtggccagttccctgctggcagcaacactcggcctgtttgactatattgccgacctgctgaactttaaaaatgacagcgccggtcgtttcaaaacagcagtagtgacgtatctgccaccagcggtggtgtgtttcttcttcccgaacggattcgtttatgccatcggttatgccggtctggcctttactatctggagtgtgattttaccgccgttcctggtaaaagcctcccgcaaacgctacagcgacagcgataccatttaccgttcgccgtgtaacagcgcggtactgaatctggtgattgtctgcggtgcgattgtgtatctgacggtcattctggatgtgttcggctggctgccggcatttaaataagcggttacagacggccggaggcaaatcatgctccggccgcttgtgcagcggttctctctgatctgccgggaggcaaatcatgtatttcaccctgttacactggcaacatccgctgtttacccgccgggaagctctgcggctgcttattcaggtacagcgcgccgttcatatgacgcgcagggagagacgggaacgccggatcagaaaaaacgcatcgggataagagcggaaaactgatcgattttttttataaacttacggtaaagcgctttcataatctctccaaaaccgtgatgactatcacgtaccgcgtatcttactcatcccgctccgtcctgcaagggttgacgcacattttttcatctctgtccggtgtaaaaaaatcacgacactttatcactcagattgcaactctgtgatatggtgatgcaatcgtttgttcgctgcatttacaggataaaacatgcaaaaatcgttatttatcggtacgttgttatctgcattttttttcagtggtttacaccctgctctggcgctgacttcacagcaggccgccgaaaagctctctctgaccgaactggcggagacctacagcccggcacagatttccgcactgacacagcagccggaagcaaaccggttcgatgcgctgatgatcaccatcggtgccctgacggcggatgacctgaaaaatccggcagcagagagtgataagcttcaggcctttgttgatgcacaacagcaggagcacacccgctatctcggcaatgtgtcggataaaaatattgtgccgcgcctgcataccgcctggaaaaccgcagtgttcccgaatgacacgaagacgctgaaaaccctgaataactttattgataaaggctataccagcggctataacctggtggatacccgcgaagaatccggctttgataaaacacggatgatccgctacggccataatgatatcgatcacgccgcccagctggtttacctgctgcgccgcgaaggctttgatccgaaagtgcagctgacgccgaaatcatccgcatttctctatctggatgaatggggtgaggcggattatccggttaccacgctgaaaagcggcaaaaaagtggcgatcgccagtgaatataatctcgacctggaatttccgtcagctgaagagcgtaaccgctttcagagcctgattgaccagtacgccaagaaaaatactgctgaccagaaagggctgatccgcgccgcctggtggcagccgttttaccgcagttatgtccctgtggacggttatgatgtggtagccgaaacccgtgtgaccagcggtcattatcaggctgatttgatggcactgccggaaaacgcggaaaaacaggcggaaaatatccgcaaagcgaaaagcgggatgcaggtaacgagtgaaaaagtgtgggtaaacccgtctttttaccgttatctgcagggggattataagtaatcctctgccggacaggacggtgcggtgttaagcccggcgccgcccttccggttctgatgataacgggcaaaacgaaaagccgctgtaaatacctccctgtacgctcaggctcgccatccatggctcgcatgcttttcgttcgcctgcccgttatcatgaacctgacattcaggttgcttcggaagagcagatcacagattgtttatccgccgataaacagccccgcaattgtggccgccatcaggttggataacaccccggcgaccagtgctttcatcccgagagtggcaatctctttgcgccggttcgggatcagactaccgataccgccgatagcaattgccacagtaccgaagttagcaaacccgcacagagcgaacgagaggatgatttgtgtccgctcagtcatcggcagaccggtggcagccacgacttcattgcccttcagatattccgccaggttggcataggcaaaaaattcgttgataacaattttctgcccgataatggcaccggatgtcagcgcttcattccacggaatacccatcagccacgccagcggtgacagcagatagccgaggatcagttccatgctcagatccggcagaccgaaccagccgccgacaccgccgagcaatccgtttaacagcgccaccaggctgacaaacgccagcagcattgcgccgaccgccagcgccatattcaggccgttaatcgccccttccgccgccgcgtcaataatattcgccgggcggttttcctgcaccggtttggcgccggattcatcggccgtctgctgtgtttccgggatcatcagtttagcaaacagtaacccgcccggtgccgccataaaggaagctgccagcaggtattccattttcacccccagcgaagcatagcttaccagcatagtaccggcgatagatgccagcccgccgcacagcacggcaaacagttcagagcgggtcatgctgccgagatacggtttaaccagcaaaggcgcttctgtcacaccaagaaaaatattggccgctgagttcatcgattccgcacggctggttttcagcagacgctgtaacgccccgccgacccagcgcacgaggatctgcataatccccagataataaagtaccgctgacaaggcggagaaaaagacaataatcggcaataccctcaacgcgataacaaacccgccgctgccgaaaatctcaaacattttgtcagagaccagaccgccgaaaataaaggatgttccggcattattgaagttgattactgtggtgactgcctctgccatcacaaataaaacgtgctgtccggccggggaatagagaattaatccgcccagcgccagttcaatggtaaaagccagtaccaccgtgcgcagattaatagcgcggcggttttcagacagtaaataacctattcccagcagtaccacgatcccgagaatgccgattgctgtattcatatgtgtaatccggtaaaaaccctgagtgaaaaatccgccggcagcggcggcataaaaaccaaaccgtgttaacatgctgaccaacaaataccgacccttcacacggtttgattgagaggagagtgcttttatggcagttgcaattcaggcaagcgcaaacgatttcgcggaaaccatcattatgcccggagatcccctgcgcgccaagtttattgctgaacattatttatcgcaggcgcgggaagtaaacagcgtccgcaatatgctgggttataccggagaatacaaaggcaaacggatttcggtgatggctcacggcatgggtatcccctcaatttcaatgtatgcgtatgagttgattcaggattttggtgtgaaaaacctcatccgtatcggcacctgcggcgcagtgcgggatgatgtgtcactgatggatgtggtgatcgccatgggcgcaagtaccgattccaaagtgaaccgtgaccgtttttacggtaacgacctggcggcactggcggactggcacttgctggcatctgcggtgaaaaccgctgagcgtctgcagttaccggtcaagaccggtaacgtgtttactgcggatctgttttacaccacccgcccggaactgtttgccgtgatggagcaatacggcattctcggggtggatatggaagtcgccgggctgtacaccgtcgcggcggagctgggcgcacgggcactggcgatcctcaccacttctgatcatattaaaaacggcggtaaactgaccatcgatcagcgccagaacgcgatgcacaatatgattgagctggctctggaaactgcactgacactctgaccgctcagacttttatccgtaaagcaaaaacgccctcatcagagggcatttttgtttgttcatgacagcgattactgtgcggtgttgttaaccggcagaatttccataatgcctgcgcggacataatactgctggccggatgcggcagctggtgcatcacccgccattttcgtcagtgcttctttcggcgttgcggtggataatgaagactgatacagcgtgttgccgttcatatcacggacgctggcgcggacaaaatactgtttgccgtctttactgactgccggggcatcagcgctcatttttttcagcgcttcacccggggtggcagtggtcagtgctgactgaaagaccggtgcacggttgtaaccaccattatggtatccgcggttattatgatagccgcgcccgtcatggttgccgcgcatcatatgacgaccgccgttaccgtcgcagttgccgtagccattcatatactgaccattctgctgcggctgattaaccggagctggtgctgcgaacgcggtcatacccgcacctaataaactcagaccgataacacctgcaatgatttttttcatattaacattccttcttaattaattttctgaagcactgttttgctgttgatgtcatcattgccgataccggtgtgtaagacaatccgttttaccctttctgactatgaaaccataatccctgcacaattcatcataatttctgcacagttcttcattttttctccacatttcaacctttttgcacgaagaaagatgtgtcagaaatgacgataaaatttaatcagctttatacttccttacataaaaaatgagccaataagattaatccccttattattgatatagggaattgttatcactaaaaaagacagcaaacagaacaacctgaggaactgacatgaaaaaaacaacaatgattgccggtatcatcgcagcggcgtattccttttcagcactggcggccacagcggatgttcaggtaaaacccctgacagccacggcacagaaagccgcaaataccgctgattatctgattggcaaaacctgggtaacgacagaggcactggatcaggacggtaaagccattccggccaccgatgaaagcgtggcgggcttctttggtctggccaactatgaaaaagacggttccgttaagatgtacaccccggaaggaaagctgaaattacagggcgattggtccttcagcgcggacggtaaaacccggacgctgaccggtaagaatgataaaggggaagtgctgtttacccgggtggtcgaaaatatcaaggtgacaccggatgaatatatttaccgcgtctatccgaaaccggatgataaaagtcattatgcggacattgtccataaaccaaaatccgcagaataaatagcgatgtacaaaaatgccctcagtgagggcatttttcgttccggcggtatcagcttgccagaatccgcgatttgcggcgtaccgcagaaagcagcatataaatcgcggtggagagcagcacaatgaagaagaaactcataatgccgtccggctgtttcataaactgtccggccaccagcgggcccgctgccgaccccacgctgtagcagaacagcatcacctgagtagccgccacaatcacattcgcggtgagtgtgtcacatgccagtgtgattgccaccggatacagggcaaaggaagacattcccagcagtgtcagcgccaccaccatcaccagataatggccggagagataaatcattcccatcgcaaataccccggcgagtgagaccatcgccagtaataatactttgctcatgcgggaagataatttactgatcaccggctgaataatcatcccgccgaggataatggccgccatcaggccaccgacctgttcggtgttgtaatgtttttcctgcaatgccagcggcatcagcccgtaaatggtgcccatcacaataccggaagtcatacagccgaccatcgccggtttgctcagacgcaggatctgtttcagggataagcttttatgcccgccgtgacacaccggttgtgctttggagaacagcggcggcagcacggcagcaaataacagcaccatcaccaccgcaaacggtacgacacccgccgttccgaacacgccgatcgccagctggcccagtgtggtgccgccgtacagtgcagtcatgtagaagctcagacgtttggcacggacagccgggttatcgccaatcagtaaccaggattcaatcaccacaaaaataccggcaaccgccaccccggccagcatacgggatgccagccatgcgctgagatcggtataaaacggcagaaccgccacggttgccgccagcgccagcacaaagagaataaaggaacggcggtgaccgatacgggcaattaccggctcaatcagcatcgaaccgagtaataaaccaatatagtaagcactggctaaccagcctgcgtaatcggtaccgatggcaaaatgacccagcgataacgggatcaggctcatcagataaccggatgcaatcgcaaataacgtcagaccggcgacagggattaacacactgtcaggacgcggcgtgcggatgctgtgactcactgcttttctccacctaaaacaaaaaaatcaaaaaaacatgacgctgctttttttctcaggctgtttcatcgccaaaatggttgatgacgggtcattgatagaagcagtggattgtgaatttatgtctgaaacggagcggaatatagccccttgcgagggaaaaatgaaatcaaaaaaactaatggctgcgagtagtttttgttatggaaggaaataacagaggaatatggggtttcccctgttattttcggtattttcacatgcagattaacaaaaaaataacttatttttccttatccgccggtaataaggaaatcaccgtctccagtgcatcggggataacactgccgtgggactttccggggaagctcaggaactgacactgtttgccgcgcagttgtaactgctcacacacttcccgtgcggtaatgtcactgtaacggacggacagattgtgtttttgttcttcgctcattttgctcagatcgggtttttcttccagtccgccctgagtgatggtcagccggatatccgccgggaggcgatcaaaacgttctgctgtcatataagtgccattgccccaccagagggacgggctggcactgatgtaatcggtaaataaaccgggttcatccgtggccgttctcagcacaaacaatccgccgaggctgtggccaaagaagtagcggtggtcgttaacagaatagtgactgctcacccacggaataacctgttcgcggataaactgccggaaaggaagttcaccgccgcctgcagcaaactgttcaccggttgcgggcggtgtgtaatcaaaggtgcgggttttcgggtaagcctgatctgagggataaccgatccccaccaccagcggcagcggccgggttttaccggcgctgagccggttaatcatcatcggaaactgtccgttaccatcgagcatatagagcacagtgtacgccgtctgcggctgtttcggctgcgcgataaagaggcggtagtgacgatcaccctgctgcatctcatgatgcgttactgtgaactgttgctctgccgcttcagtgagcggcgtaatctcttgtgaaggccgcgccatcaggggagatacagccatcatgcaacaaatcaccattatttttttccacatcctgactccgggaaagacttacttaaaaaaccaattctgccacgggacggaggatgacgcagattcggttcgcgccatccccggaaaaaataaaaccattttctttcaaacccgggcagcgggataaccggcaaagcggaaagacgctgacacatccttgttcgcgaaatctgctgaatcatccgttctgtggcaaggcggcaagggaaggattccgggggcctgattctgccacggtgatccggctgataccacgcagaacgaaaagacgctgtcacatccttgttcgctcggatcgcgccatccctggcgctctacgcttttcgtttttctgcgcagcatctgccgtctacataacgtattgtgtaaacagaatattgacctggtttcctgagagcagccaacgccgccacaaaacaaagagacgcgttacgctaaatcattcgctctgtggcaaggcggcaaagtgaggatatccccgggagcatacatcagtatgtgaccgggggagccgaacgaagccaacgccgccacagggcgaaggatgacgcgtaatcagaaattcagtttcagattagcccaatacctgcgcccttcatcgatctgccagttcccgttagtctcgatatcatcccctttctcattggcgatgttcagtactgcgaagttcagcagcgcatttggcatgacctggtatgtcatcccgaggtcgagggtggtgatcccgctgcgttcacgcggctgtttggccccgttacgctgtgctgcccagacctgtttgccggtgtagtttgcctgagtgtagaagttcatatccgggcggtactgccagtcaagtctggcattcgccatatgacgcggtgtcatttccagcggttgtcctttcagggatttaccgttgagtttttcgtcgtcactcttacgttctgaatcggtgaaggtgtagttcaggttcagattccatttttctgccaccggaatacgggaagccatttccacaccacggatattcgctttacccacgttgtcgtagataaacatattcaggccggtcagcggatcggtttgaccggcgacctggtagctggtcagcttgtttttgaattcggtgttaaacagggttgcactggcagagaaaccggattcgtggtcataagcaatacccagttcttcggtaacgctggtttccggtttcaggtcacggttaccgtacatgatagccgcaccgccttgtgtggacgttccgaaattcgggcttaactctcgcagtgtcggggcacggaaggctttcgccacgccacctttgatggtgatttcatctgtcagcttatagacggcataggcacgcgggttccagtgtttaccgtagaattcgtggtcgtccatacgcagaccgccggtcagcgtcaggtcgtcggttacactgaattcatcttccacaaacagcgctttctgctcagcagtcattttttcagtgacggtctgtttgtttttaatcacggaatcatctttcagtttggcatactgatattgtccgccgacagtcaggacgttagacggcaggaatgcagtgacctttccgtcaaccacagtattggtgacttccggctggcgggcttcatatgccatgacccagtcttcactgactttattccatttgccggtattggttttacggatggtattttcctgatacacactcacttcactgttaatttcgtcccagtcacctttccaggtcagcgcccagtggttacgattgttgtgtacttcggatttgttgttcttctgaacgataccgccacgggtagttgtctcatcaatcgatttccccggggtagatgtgtgttcctgtgtgctgcggccgacttccgcaaggaatttctgcccttcaaccggcgtaaaggccagtttagcggtgatatttttgtcgtctttgcgcggtgtaccttccaggagtttatcttcgcggcgatagttcagcccgccgtaaacctgtaaccccagcttgtctttaatcagcggcccggagacatagaaatccgtatttgcggagttaccgtaatctttactttcctgaatgataccgcccatacccattgagccgtgccattcgtctgccactgctttagtgatgatgttaatcacaccacccatcgcatcggaaccatacagggaggacatcggtccgcggatcacttcaatgcgttcaatggcttccaccggcgggataaacccggcttcgtaaccgccgctgccgttcgggcgggactcacggctgttctgacgacgaccatccaccataatcagggtgtaatccccggacagaccacggatgctgatatccggcttcaggctaccgccgatcacactgacaccttccacatctttcaccatgtcaatcaggttggcagccggtttattttgtaactgttccttggtgataacggtgatactcgccggtgcatcgcgcatttcctgcgcaaaaccggaagcggtaaccacgatggtgtcatctttattttcagcataagcggcggtggccgctgacataacagcaacagcaagcagtgagcgtttgaatgaggcgttcatattattccctgactggattgatattttttatttgaaatattaaatgagaatgattaatcctatcattgatatatgctattgagaatatgatcgcaaatgaaaattattatcacgatgataataaattgctgtgacatcgttaaaccggaaagtacagctggagagtaaacggcgggaatgaaaatcgcaggataaaaaaatgctgcaaattcaggtgaatttgcagccttctaacaaagtaccaaagtaaatagtgagggataactaataaataaaattaacacattctcgtcaggaaaatctgctcatcaccgagtggcggagaaccagagtcggtgtgtaacacggcggacaaaacggcagcgcctgcgaggacgccagcgccagtgccagctgtgttgctgtctgagccatcatatcaacaggatagcgtattgtggtcagacgaggttggatatatcgtgcgatcatgctgtcatcaaagccgataacagaaatatcttccggcgcacgtaacccgtttgcctcaatcaccgacagcgcccccgccgccataaaatcgttgtatgccaccaccgccgtcaccggcagtgaaagggacaaaacagcgctcattgccgcttccccgccttctgccaccggttcaccaacggcaatataggcctcaggaagctcacaaccggcttctgtcagagcgtctctgtagcccgccagcctctgagcgctgtcttcaatcgtgtgtgatgacgataagcaggcaatatggcggtgcccctgtttcagcagatattgtgtggcaagctgagtcccgcgccggttatccagagcaacacagcggttttccagccccgggatcatacggttgataaataccatcgacggcatctccgctgcatagccgcgcagttcttcatcactcagtgctttggcatggatcacgcaggcatcacagcggctgttcatcagtaattcaataccacgccgctcatcttcctgccggtgataaccgttgccgattaaaagatgttttccgtgctgatgcgccacctcatctgcggctttgaccagtgaaccgaaaaacggatcggacacatcccccaccagtacgccgacaatatcactgctctggctgaccagcgcccgcgccgccgcattcgggcggtaagccagctccttcatggccgcctgaaccgcacggatggattccgcaccggctttcggtgactgattgataacccgcgagaccgttgccactgatacccccgccagtttcgcaacatctttaatggttgccatttaccgctccgttattgttttgtgatcccggtacttgccatccggcgtaactctgctaatttttattatcttttactaaaattttatcggattttactatggaaactgtcgcttaccctgatttcgctaaactggagatccgcaccggccggatcacggatgttaaacgtcacgaaaatgccgataaactctatattgttcagataaatgtaggtgaccgctcacttcagaccgtcaccagtctcgtgccgtattatacagaggaagagttactgcataagcaggtcgtggtgctgtgcaatctgcaaaaagccaaaatgcgcggcgaaacctctgaatgtatgctgctgtgcgccgaaaccgatgacggctcagaaagcgtcctgctgaccccggaacgcgtaatgcctgccggtgtccgtattgtctgataaagcaaagtttgtcaacggcctgagtggctcaccgttgtgagccactgtctaaaacacaaaccggtatactgtcacactctcccgctgttcccccgccgctgaaatgcccctgaccgcatccggccagtgcgggtaattcggcccgtccgggaaatactgggtttccagcgccagcccggcataatcctgataatcgccgtgttttcccggctgaccgccgagataattgccggtataaagctgtatgcagggcatggtggttgccacttccagacacacatcccccgccggtgaccagtacgccgcgacagtctgtttaccgtcacacaatgccgggtccggcacaaaggcgtgatcaaagccttttgcctgctgctgtgccgcctcagacataaaaccctgtgacagcggcctgcgggcgcgcaaatcaaacacagtgccggctaccgggcagagcgtcccgtccggcaagttatctgcattcagccccagccgtttgtccgcccggatctgcatttccccttctgtcaccttcacgccgctgttttcaccggcaaggttaaagtaagcgtgattggtcaggctgaccggacaggctttgtctgtttgtgtccggtaagtcaggcggacttcgttttccggcgtcagctgataagtgacttctgcgctgagattaccgggaaagccctggtcgccatccggggattgcagggagaatgtcacggaatccgctgagcggcggcggatctgccagcgccggtggctgaagttatccgttccgccatgcagacaggtggtgccttcattgcaggcgagcggataaaactgtccgttcagggtgaaacctccacccgcaatccggttggcaaagcgcccgaccgtcgcgccgaaataggcggtctgacgggcaaatccggcgctgtccgccacaccgcacaccacatcccgcataccatctgccagcggcagctcacagctgagccaggtcgcgccggtatcggcaatactgatgcgcatgccgttgcggttggtcagaaccactacctccgccggtctgccgtctgcggcaggctctgttgccagcgcccgctcataggggcgctgctgcatatgtgtcatattacctccggtcagcggatcacaccggcgccctcactggcgcggcagacataaatatccgctgtcagcccggagatcgccgtatagtgtgcgttaatcgcgtctgtaaccggcgcgacatgttccggtttcaccagtgcgaccacacaaccgccgaagccgccgccggtcatgcggactccgccttccgcgccgataacatcaccgataatcataaccagcgcatcaatttcagggaccgtgatttcaaagtcatcacgcatggagtgatgggattccgccatcagctgactgagacgcggtaaatccccgtctttcagagcttccgccgctgccagggtgcggatattttcgctgatcacatgacgggcccgtttcgcggtcaccgcatccagctcatgggcacgggcggcgaactgctgcatagtcacatcccgcagcgccggaacgccgaagaactccgctgccgcctcacactgacgccgccgggtgttgtattcgctgtccaccaggccgcgttttttgttggagttaataatcatcaccacactgttttccggcatggcaaccgcgcgggtttccaggctgcggcagtcgatcagcaatgcgtgcccgtcttcaccacaggctgaaatcagctgatccataatgccgcagttacagccgacaaactggttctccgcctgctgcccgttcagggcaatgacttcacggctgacgggtaaatcatacagggctttgacagtctggccgatcaccacctccagcgaggcggaactgctcagacccgcgccctgcggcacattgccgctgacagcaatattcatcccgccgaacacaaaaccgcgctccgccaggtatttgatcacgccgcggatataatttgcccacaatttattatcgcggtattcgatcggctgtgagagatcaaactcatcgcgatcattatcataatccgcagccaccacgcagaccttctgatcatcacgccgcgaggcggctgccacggtgccgaaatcaatggcacacggcagaacaaaaccgtcgttataatctgtgtgttcgccaatcagattaacgcggcccggtgcccggatcagcatgtcaggggatgcgccgaagcactgttcaaaggcatgtagtgccttgctgataactgttttcatcggaaacctcagattataaaggggttttaaaatggtggtcgctgactacacgcagccgctctgcagcctgctccggtgtcaggtcacgctggctttccgccagcatttcatagccgaccataaatttgcgcactgtcgcggaacgcagcagcggcggataatagagtgcatgtaactgccagtgatccagcggttcgccctgctgaaaatacggcgcaaaatgccagcccatcgagtacgggaaggcacagcggaacaggttatcgtagcggctggtgagttttttcagtgccagtgcgaggtcatcccgctccgcatctgtcatggcttccatccgggtgatcacgcggtgtttcggcagcagcatggtttcaaacggccacgccgcccagtacggcaccactgccagccagtgctccgtttccgtcacaatacggctgccgtctttcagctccgcctgcgcgtaatccagcagcaggttactgccgtgctgccgggaatagtcgcgcagcagtccgtctttgcggctcagggcatcaggcagaaaatcactggcccagatctgaccgtgcggatgcggctgtgagcagcccatcagttcccctttattctcaaacagctgcacccagaggtattttcccccgagttcctgtgcctgcgcctgccaggtatcaatgacggcacggatttgtgccaccggcagttccggcagagttttgctgtggtcgggagaaaaacagagcacgcggctcagcccgctgacggcctgagtctgaaataacggactggtgttttccggctgtgtgcagggctgcggtctcagcgcggagaaatcattctgaaaaacataagtgccggtgtaagcaggattaatatcgccgcttacccgggtatttcccggacacaaaaaacagtcagggtcataagccggtaaatccgccacatcagcgacttcatctctcccctgccacgggcgttttgcccggtgaggagagactaaaatccactgtcccgttaacgggttatagcggcggtgagggcaatcagacggatcaaaagtcatcatagacacaattctctctgacgatgaaacgggttagcgatgattgtcctcaggcgttaccggttttcgtctttcgtcagtctgcgtaaccttccgggttctgctgctgccagcgccaggcatcctgcgccatatcatcaacagtgcggacggcacgccactgcatatcacgggccgctttatccgggctggaccagcactcagcgatatcccccggacggcggtcacagacagcatacgggatcggtttaccggccgctttactgaacgccgcaatcatttccagcacactggtgcctttgccggtgcccaggttatagatatgcagcccggaggactgtgccacggttttcagtgccgcaacatggccgtccgccagatccatcacatggatgtaatcacgcaccccggtaccgtcaggtgtagggtaatcgtttccatagatactgactttttcacggcggccgatagcaacctgagtgatatatggcgtcaggttattcgggatacctttaggatcctcacccatcgtgcctgtcggatgcgccccgaccgggttgaaataacgcagcagtgatacagaccagtcattatctgcgatcagcacatcattcagaatgcgctcaaccatgtatttactggtgccgtaagggtttgtggtgttaccgatagcggattcttcggtgatcggcacactggccggatcgccgtaaacagtggcggaagagctgaaaataatccgtttcacctgcgcccgcttcatgctgcgcagcagaaccagcgtgccgttgatattgttatcataatattcaaccggtttttccacggattcacccacggctttcaggcccgcaaagtgaatcaccgcatcaatacggtgtttggcaaatacgctgtcaagaaaggcttcatcacggatatccccctgataaaaaacaggttcttttccggtaattgcagtgatccgcgccagaactttggcattggcattacacagattatccacaataaccggtgtcatgcctgcattcatcagctgtacgcaggtatggctgccgatatagcccataccgccggtgacaagaatttccacatatacctctcaggctttgtaatgtattcagagaaaaccaaagtataacgtgaggacggggaagattctaaccatgaatagtttttgagtctgtgatactgatctgatttgtgtaaacgtttacactgatgcactgaatggtttttactaaaagtttctgtgttactataagtagctgtcactgcctgaattacgcctgttgccctgccgcagttcccggccggaggagaaagaacaaaaaaatggccacgctaaaagatatcgcccggcaagccggtgtctcactcgcgaccgtgtcgcgggtgctgaatgacgacccgacactcagtgtgaaagaagaaaccaagctgcgtatcctggaaatcgccgagaaactggaatacaccgtttccgcgcagcgccgtcacaccacgggcaaacgtcaggcacagcggctgcatttcctggcggtttacagctatccgaaaacagcggaaattaatgatccttattatctctccatccgccacggcattgagttacagagcgaacggctgggtattgagctgacgcacgcttatgaaaacaatctgccggagacggtctcccgcccggacggcgtgctgctgatcggacacggtgcccgcgcggtactgacagaagtacaggcactctgctctgccgtctgctttgtcgatttcagcgatcgccagagtgattatgacgcggtggatattgacctcgcgtacattgcgcaatccgtaactgatttctttattgcacaaggttatgaccggataggttttatcggcgggcaggattccccggcggcggatatccgcgaagtcgcgtttactgaatacggctcactgcgcggtgtggtgcgcggggaagatatctatcgcggggatttctccagcgcgtccggttatgctctggcaaaacagatgctggccggagagagctacccgaaggccctgtttgtcgcttctgactccattgctatcggcgtgctgcgcgccctgcatgaacagcatatcgctatcccggaggatatcgctcttatcagtgtcaatgatatcccgaccgccaagtttaccattccgtcactgtcgaccgtccgcatccactctgaggtgatgggcagccagggcgtgaatctgctgtttgaacgtctgcgtgatgagcggcaggagccgcttcaggtctttgccgcctcccgccttattctgcgcggcaccacgaagtaataccccctccgtaagattctgacggctgccggaaaggcagccgtttttctttcagtaaaatttaccttctgcaaagatgactgccttttacacaatttagcgtttcagctcacaagattgtgccgctgttgtacggattatgtgatcaagttaaacatcttagttttactctatagtttttagtaaaacttttactaatatcccgttaatgattgatctcatccgatagcccgcagtgattgctgactataaagaaggagcttctgtgaataactgggaaaactacaccctgctgcatgaaaaccgcctgccgccgcgtgcccatttctttgcctatgataacgacaccgccgcacgcacttatcagcgtgagctgagtcagggctttaaactgctcagcgggcaatggcagttccgctattttgatcatccgctgcgtgtgccggaggcgttttatcacacgccaatgacagaatggtcatccatcactgtcccgaatatgtggcagatggaaggccacggacagctccagtataccgatgagggctggccgttcccgattgatgtgccgtttgttccgtcagataacccgaccggtgcctatcagcgcacgtttacgctggatgaaaactggtcacaacaacaggtcattattaaatttgacggcgttgaaacctattttgaagtctatgtgaacggccactatgccgggttcagcaaaggcagccgcctgaccgctgaatttgatatcaccgaatttgtcagcgccggggaaaacctgttatctgtccgcgtcatgcagtgggcggacagtacctatattgaagaccaggatatgtggtggatggcggggattttccgcgatgtgtatctgattgcacagccgccggtacatgtccgtgatctgactgtccgcaccgattttacgccggattaccgcagcgccctgctgaccgcctctgcggaaattgccggttctgcagaagggatgcagattgaggccgttttatatgatggcagcaccgtctgtttttcacagaaaaaagcgctgactgctgacgatcataccattacattcaccgcagatgtcgcttccccgcgctgctggagtgcggaagatccgtatctgtatcacctgctgatccgcctgtcggacagcaacggtaatctgctcagtgtgatcccgcagcgggtgggattccgcgatataaaagtccgcaacggcctgttttatatcaataatcattatgtgaaattacacggcgtcaaccgccacgataatgatgaacacaaaggccgtgctgtcggcatccgccggatggagcaggatctgcggctgatgaaacagcacaatatcaatgctgtccgtaccgcgcactacccgaacgatccgcgcttttatgagctgtgcgatatttacggcctgtttgtgatggcggaaaccgatgtggaaacccacggttttgccaacgtcggtaatctcagtcagatcaccgatgatccgtcctgggagccggtgtatgtcgaccgcatccgccgccaggtgcatgcacagaaaaaccatccgtccgtgattatgtggtcgctcggtaatgaatccggttacggctgtaatatccgtgccatgtatgatgccgcaaaagccattgatgacacccgtctgatccactatgaagaagatcgtgatgcggatgtggtggatatcatcagcaccatgtattcccgcgtgcagatgatgaatgaattcggtgaatatccgcacccgaaaccgcgcattatctgtgaatatgcccacgccatgggcaacgggccgggcggactgagtgaatatcaggcagtgtttgaccgtcatgacgccattcagggacattttgtctgggaatggtgtgaccacggcattctggcacaggatgaacagggtcgtccgttctataaatacggcggtgactacggcgattacccgaacaactataacttctgcatggatggcctgattttcccggatcaaaccccgtccgccggactgaaagagtacaagcaagttatcgcaccggtgaaagtacgtgattttgatgcgaacaacggcgaaatcaccattgaaaaccgcttctggttcagtacgctggcagagtgtcagatccgtgcggaatatagcgctgacggcgatattattcacagtgaaattttatcactgcctgaactcgccccccgtgaaagcgcccgtgttgccctgaacttaccggctgccgatggccgcgaaatgtttgtcaatatcatcgttacccgtctgaatgccacccgctacagtgctgccggacatgaaatcgcggtttatcagttcccgctggcggcggcatccgcgccggtactgccgtttatccgccatgatgccacgccgctgacggtctgtgacgagcgcctggaaatgcatattcgcggttgtgatttcaccctcaccttctcaaacactgacggtaaattaatccgctgggaaaacagagggcaatccctgcttgctgccgcaccacggatgcgtttctttaaaccgatgattgataaccataaacaggaatatgaaggtttatggcatccggcacacctgcaaatcatgcaggaacatttccgtggcatggaaacggcacaggaaaacggccatgtgattgtcaccgtgaactctgtggttgcaccgccggtgtttgatttcggcatgcgctgtacttaccgctacaccattgcgccggacggccatgttgcggtgaccctcagtggtgagccgtacggcgattatccgcatgtgatcccgtgcatcggcatggatatggggatcgatgcccgttttgaccacgcggagtactacggacgcgggccgggcgagaactacgcggacagctgcaaagccaatcttatcggccgttatcagtcaccggtcagtgacctgttcgttaattacccgttcccgcagaacaacggcaaccatcaggacacccgctggctggcactgacagacaatcacggcagcggcctgtttgtgcgtcctgatcagccaatcaatttcagctgctggccatgccgcggggaagaactccaccgtgcccaacatcagcatgaatggcagccggacggccatatcactctgaaccttgatcacgccctgaccgggctgggctctaactcctggggcagtgaagtcctcgacagttaccgtgtctatttccggccgttccgttttggattcacactgctgccgtttaccgaaggcgactgccgtgcggaaacactggcaacactccatttttcaggcgaaacacactcaggaggccgggcatgatcctgtttactgatttaacggattttcagcgttttttccgtcagggcaaaaaatggcagcgttgtattgaggccatcaataacctcccgtctattcatcctgatgtgacctattctgtcggtgattcactgatataccgccttcagactaaagcagagccacagccggatttcctcggtaaacgccgctattttcaggtgcattactggctggagggggaggaaaacgtggagtatgccgacaaatccgccctgaccccggtgaatgcttacagtgatgaaactgaccgcgaaaacctgcgcggcaaaggggaaaccctgctctgtaaagccggcaatgtgctggtgtgtgaaaatcacgaggcataccggttcacctgctcaggcgatgtccgcaaagtggtgcttaccgtgaccattgaagacggttatttcctgaataaatagacccacggagaacgctatgtccacatccgcgcgtaataccatcggcaagttcggactgctgtccatgacctttgccgctgtatacagttttaacaacgtcattaataataatatcgagctcggactggcttccgcaccgatgttctttatcgccacgattttctattttattccgttctgtctgattatcgcggagttcgtctccctgaataaaaactccgaagccggtgtttacgcctgggtgcgcagtgccctcggcggccgctgggctttcctcgctgcttatacctactggtttgtgaacctgtttttcttcacctcgctgctgccgcgtgttatcgcctatgcctcttacgccttcctcggctatgagtatatcttcacgccggtcaccaccgcactgctcagtaccgtgctgtttgccttctccacctatgtgtccaccaacggggcaaaactgctggggccgatgacctctgttacttcctcgatgatgctgctgctgaccttctcgtatatcgcgctggccggtgttgcgctggtggggggaattcagcctgcggatccgattaccgtggaagccatgacgccgaactttaactgggcattcctcgggatcaccgcgtggatctttatggcggccggaggtgcggaatctgttgccgtgtatgtcaatgacgtcaaaggcggcagtaaagcattcgtgaaggtgattattattgccggattattcatcggtctgctctattccgtctcctccgtggtgatcaacgtgtttgtaccgcgtgaagcactgaagtttaccggcggctcggtacaggtctttgaagggttatccacctatttcggtctgccggagatcctgatgaaccgctttgtcggcgtggtctctttcaccgccatgttcggctccctgctgatgtggaccgcggcaccggttaaaatcttcttcgcggagatcccgaaaggtgtctttggtgccaaaacagtcgagctgaacaaacacggcgttccggcacgtgccgcctggatccagttcctgattgtgatcccgctgatgtttatcccgaccctcggttccgataccgttcaggatctgatgaacaccgtcatcaacatgactgccgctgcatcaatgctgccgccgctgtttatcatgctggcgtacctgaatctgcgccgcaaactggatcatatcccgcgtgacttccgcatgggttcacgcaccacggggattgcggtggtctccctgctgattgtaattttcactatcggcttcctggcctccaccttcccgaccggtgccaacattgcgaccattctgttctataacgtcagcgggatcctgattttcctgggctacgcctggtggaaatacagccgttatgagaaaaccctgaccgcagaagagcggaaaatcgccgatgccccgaccgcgcaaaccgcactggcacgcggcgaagaatccgtcgataatatctgattatcctgcagatactgaaaagccaccggacggtggcttttttattgtgctcagagaatcccctgacagaccggggtatattatttctgatagtccggtgactccggtggtaaccggcaaaaatgaaaagtcgctgtaaatacggtccctgtacgctcaggctcgccatccatggctcgcatgcttttcatttctctgccggttaccccccttttacattaaaaccagctcagtaacgcggcggctgcaactccatcggtactgtgtcggaagttttgatcagattaataaaatcgattccctgcgggctgaaaataaacaacgcatagccggtggccattttaatatcatcgttgcgggcaatccccgggaagcccggcatcgggccacctttttcaacctgcttaatcagccccacctggtcaatcatcacactgcatgccagttggccgttcatctcttttttatccatccgcaccatatcgccctgatacggacgcgaggtgaaatgatcaacgccgtttttgtccttcacgcccacaccatactgattagtggatttatccagcaatgtcagggcaatactctgtgattccccctgcagcggcagctgataaacaccggtgaaatccgggcagttttcctgcgtctgcgccggtggcagaggcgcggcacaaccgctgagcaaaatcgggagcagtgcggttgccagccagagtttgtgcgtcataaatatccttttgtcagtgcattttccggagccggaacagacacaaagtctatcacagtttcccgcgcatccggaaaaatgccgcagtattgccctactttaccttatcccagcgcaccaggctttctgacaacaccgccagcaaaattgccaccagcatgccgttccccagcatcgggcgcagcagcaccggcaggtcgctgataaaaacggcaggcggattgatcaggaaaataccgacaaacagcgggatcgccagccggtaaatattacgggcattcagggaaattttatccacgaaagccagcgaggaaaacatcaacggcaggtaagttgccagcatcacggcactgccgatggcgagcggcaatccgctgaagaaaagtgtcaccggcgggatcagccccatcagcagaaacagcacactgccgaccaccagggatgtccggctgctgtcattggtctgggtgattaatcccaccgaggagacaaacggtgcaaacggcaccaccgccagcggcgcggtcagcagcgttaccgagccggtgacaataaaactgcgccggaacaggacgttattttcctgtaatttatccatgtaaaacacatccgtcgaacggatggcaccgaaggtattactgatattcagaagcccggtcaggatacaggtaataatcacgccccagcggaattcaaacccgtcagtgctgccgagcggcagaaattcccatgatgcggatgccacatcccgtcccggcggggaaaacagcagcacgtaagctccccagcccagcaacacgccaatcagcagcgcatatttggccacggacaccggggcatacacaatcacgcccagcaccaggatcagcgttaccagcgccaggaaaaaaaccgggtaattcacggtggcatccggcggcatgataccgaacggcagtcccagcatccctttcaggaaaatggagaccagctgcgcgcctatcataaacataaacactgccatcaccgccgggttaaaaatccgggcgatacgggctcctgcgccggtaaagccaatcaccagcgtgataagtcccgcacaggcaatcccgatagcaaggtttgcgccggtcacacccgcagaagtcccgaaagaggcttccgccacagcgatccccagaatggtagcccaccacaggccggtcggcccttccataatcgcacgctggtggccggtaaacacctgcaccaggctgccgagcgcggtggcgataaaactgtattgtgtgatagtcagtgtggcggcgtcagaaagatgaaacgcagattgcagtgtcggcgggatcagtaccgtattgcagaaaataaagaaataccactgaaagccggacagccagtggcttttttgcatttttatcatggggtaacgccttttggatgcagtgtcagatttatttttaatatagtgataatgatcatactatcaaagagagattattttgtgagtttttcactcagagaggtcatgatgaaaccatccgttcttgtttaccgcgatattcctgacgatatcctcacccgtttgtccgctgagtgcgatgttcaccgcgtggcggaaattgatccggacattgacccgtcagtaaaaccgctgctggccggagcggatgctatcctcggctccggcgggaaaattgatgcccgtttcctggcgatggccccgaaactgcgggtggcttccaccatcaccgtcggttatgacaattttgatgtctctgccctcagtgcacggaatgtggtgctgatgcataccccggatgtcctgaccgaaaccgttgccgatgccacgatggcactggtgctggcgactgcacggaaaatgatcatcagctcagagcgggtgaaacgcggcgagtggacagaaagtatcacgccggactggtacggctgtgacgtccaccataaaacgatgggaattgccggcatgggccgcatcggtgatgcactggcgcgccgggcgcactgcggattcggcatgaaagtgctctacaatgcccgctcccgccatgaaaaaaccgaaaaagcgtatcaggcggaataccgttcactgaatgccctgttggcagagtcagattttgtctgtatcaccctgccgctgacggcggaaacccgccatttattcggccgcgaacagtttgaaaaaatgaaacgcagtgccattctggtcaatatcgggcgcggtgccgtgatcgacgaagccgcactggcacaggcgctgaaagataaaacgatcctcgccgccgggctggatgtttttgaacaggagccgctgccgccggattcaccgctgctgtcactggataatgtagtactgatgccgcatatcggctccgccacccatgaaacccgctatgcgatggctgcctgtgctgcggataatgtactgcgtgccctgaaaggggatgtcagtcagaattgcgtcaatccgcaggctcagcaacagtaattatcccgtctgtacacagcaggttatctctgacggataatctgctgtctctgctatttccgcccttcccggataaatgttaatttccataattatcagataaatacgatagtattcatcgctgatatagtttgatctgtagcacactattccggaatacggatattcagggaaaataccgccagtgtattaaaggtcagcacatgaaaaaaatcagactatcgcttctttgtattcctgttttgctttttggcttttttctgttttttcatgaaacaggacgcattatttatcatgaatccgacacttaccgctattatatgtacacagacagcggaatacggaatgcgccgcggatctcagagaattatcagtttgaatataccccggcagaagggtcggtttctgaaatgagcagcgttgtttttcatgatgtacgggattgtgcaccactgaaaaattacctgaataatgccggttattatctttaccggacgcaggatcagggacaggatgaaatctggttatccgtgcgggataaaaaagcgctctattctctgcaccgggataaacagggccggtttgtccgcctttcccgcagttctttataaaaacacagacgggtatgtaaagccgtctgtattttccgtcagaaggtaatggaacgaccaatactgaccgggtcacaccagcgggctttatactccccggacatcatgccgtaagaataggtcaccggtgcgggcaattctgctgtcaggcagagattgcgccacatcagcatcgtgccgatagaatatttgcgtaaattcatatcgtagccgatgttcagaaaatcaataaatgttccccgctttgacggtgtggaaagcaataactgaatacccactgctttaccgtccaaaaacgcaatttccccgaaaaagttattatagcaatgatgaaaaagtgcgcggataaccggatcgttctccacctcatgcccccgccggccggcatataacctgaagtaggtttcaaataaaaaatccggcccggcagtgctgacattttcaaatgtcccgccatcggctataaatttacggatctcttttttccgggtagctctggttttggaagaaaaagcggaaagatcttttgaaacggccacatgacgccgggaaaacagcgaaaatgagctgttataaaactgacggcattctgtactcagggatttggttttaaacggcagaaaacatttaatatttttattaaaaggcagcaggatggagtagcgggggaaatacatccacttcaggcggtttgcggggttattattgtcgtttgccagccagccgttatctgtgcagacagcaccttcaataacgcctttttttgtgtaagcgtagaaatccggttcaacgccctgctccatggcgaacttaatatagtgcggtgaggtttccgcattataaccaaacttttcacagcaggcttcatagtcactgaagctgcatttttcccatccccggaatttcatcatacctgcagtgttctgcccattaatgtaattatgtacgctattctaattaaaccggctacaggtgcaactaataacagaatcaccgtggcaggttcatccccgccacggtaattctgtcagaagataataatcaggttgtcagcccggcccggacggactgggcgggatcaatatgcgtcatcacactcagcacctgcgggtcacggcggatattcatttccgctgcaatagcgatatcatgcccttctttaaccgtcaggttttcatcaatttcaatatggacatccaccagcagataatcgccggacttacgggttttcagatcatgaaccccttccacccccggggtatccatcacagactgcgtgattttggcgatggtttcttcatccgcaccgcgatccattaaatcctggagagactgcagggtaaatttcacccccatgcgcagaataaacagcccgaccaccagcgctgcgatcgggtccagaattttataccccatcagactgccggtaataccgatggccaccaccagcgatgatgccgcatccgaacgggcatgccaggcattggcttccagcatattggatttcactttacgcgccacatgcagcatatagcggaacaggccctctttcgccagcagtgccagcagcgcgacatacagcgccagcgagtgcacttcgggaatggtttccggtgacataatccgtgaaccggcggtccacagcatcccgccgctgacaaccagcagcagcacgcccagaaccagcgacgccacgttctcatagcggaaatggccgtaagggtgttcctcatccggcgctttacggctgccgcggttggcaatcagcaccacaaaatcagcgataaggtcagacagagtatgaaccccgtcagcaatcagcccctgtgagtgcgagaaaatacccgccactatctgccatgcagacaacagggtattcacccagacgctgacccaggtactttttttcgcggccgcgaattttatctcacggctgatattcgcgctgttttctgcggtttcatccgcctgtgcaggtatattggacataatttaattccacattatttttgtggttaatacaaagcaaatacatgctgtggatcgtgatcattatagttcagcaaacggattaatgccgttctttctgaacaggaaataaagaattacaattaataaggttaaatcagaatattaattcagcgcccacagtatgccacaatatttttttcacgtctccaattttatgattttatttgatttttataactgagaatcattattcttatcgcttttaaaacggcttctttcattccccgtcactgatgacgttatcattattctctttaattcattccctcctttttattattgttaataataaaaataaacgatagttattttcatttcacaaattaaataagctgccgtcatgatcacagcacacgctgtcattttttgtcatactgttactgatttcagttaacaggaggctgtatgtacaacacgattctggttccgattgatattcttgaagatgacctgacagacaaaatgctgccccatgtggaagcactggcgaaaattgataatccgaagatccacttctttaccgttatccctaacgtggaaatgttcttcggggtggaatacgcctcaatgccggtcagtatgcgggaatccggagagcgcattgagctggcgcttgccgcactgaaagaaattattaaaggaattgctgtgccggaaagtcagtacaccctgcacgcggctatcggatcagccaaaaacgaaattctctcttatgccaaagatattaacgccgacctgatcctgatgggctctcaccgcccgggtgcggcaacattcctgctcggctctaccgccgcaacgattgtccgtcacgccaaaacctcggtgatggttatccgctgatcccgtcagtctgtttattctgccccgcgtcacagcggggcatgttatttcagctgcgtttaagcttatcggtatttgccagatataatgccacggtcagcgccagtattgacagggtatgcaggaatgtcgcattggcatctgaatgatcgacaataattaaacgcaccatcgccgtaatgccgatgtagataaaatagcgcagcggaaaatggtagcccgacgaaaaatacttcacaattaaggcaataaattcaaaatagaggaaataggtcacgatactgtctaataacagataggttgttttctcctgcgcggaaaacagcagattaatcagcgtcagtgtttcctttcccataaatacaatcagcagcacacctaaaatcagcagtgcaatattcagaacccattgcagcacagttgctatctggcgggatggctgaaattccataatcaatagcctcagtgatagacgacaattacgcccgtaaacagtatgggtttaaggaaggtgcgatttaatcgtcatatgtgagaacataaagctttctttatcatgagctgtttacaatgcctgccatttccagctattcctcccgtaaatcccgttttcttgaccgtatgaatgttctggtgccgtggcaggatattgctgataagctgcttcacgtctatccgtcatcccgtcgcggccgacggcctttccccctggtgcttatgctccgtatccactgcctgcaactctggtttgacctcagtgacggagcggctgaagacgccctgcatgatgtcctgccgttccgtcaatttgcggggatctgtgacacggtgccagatcgcacaaccatcatgaatttccgccattttctggagaaacatcatgcaggagaacagatactggcactgattaaccagaaactgaagcaggccggactgatgttacgtcagggcatcattatcgatgcgaccattatttccgctccctgttccgtaaaaaataaagccggtcaacgggatcctgaaatgcatcagacccgcaagggaaatcagtggtactttggtatgaaagctcatattgctgttgatgcggccacaggcttgacggaaaaagtagtgaccacggcggcaaatgtgcatgacctgaatgcggcggatagcctgattacggagccggtagcaattgtcttcgccgatgccggatatcgcggggcagaaaaacgggactctctgacacatcgggttaaagagtggtttattgccaaaggtcctcatgccgtaaaaaagctcagacagcatccccggctgaataagcaggcgctgcatgatgaatatgtgaaagcaggtattagggcaaaggttgagcatcctttccggatactgaagtgccagtttggtttcagcaaaacacgattacggggactgatgaagaaccacaaccggctttcaatgctgtttgcaatgtgcaatttggtgcgggcgggacaactggcggggatgtcgtgaaaatcattgtaatatcagtggagcagtgacattttgcttaccctgagttgatgggggagattaaatattgtccaaactggggtgcttactttgccgcgtaaggaggatatccaggctctggatcgtcatgactgattaaatcgcaccttccttaagtgtacgacgaaatgatgacagaaccgaataaaaaacaaaaaacacggcaggcgccgtgttttatgtatcagatattaacggattatttggccggtgcatccagcagctgattatccgtgctccagatacggtattttacttccacatctttcggggcgtacaccacaaccggcaggcggctgttgtaacggacgaatgcttcgtcacccaggttagcgctgacaaacgcttcgcgtttttcattattgaggcagcccatcatggtggacatcggcccggttaagtcgccggtctcataatagtcatagccgaaaccatcaacggttttctgtgtcagcgtaccgccgaaccactggtggttacagtccaccatctgttttttaccgatcaccagctcaattttgtactgcccttcatcggctttcggctctacggcaatcacatggcgaacctgatctgacgcagcctgcgggaagtgtttcaactcactcatgccgttgtcagttttcacaatcttcagcggctccatatcagtggtttttgcttcttcagcataagcgcctgcggcagcgaacatggccataacaggaaggatcaattttttcatcaaataattaccttgttttataagtacatttgattatgaaatcgtctcataatcttcatgctgactattaagaacattataataatctttagttcaccgccagagtaaaacacagaatattcttacaaaatggcagataatctcagataaatcaccactgccagtgtgttaaaccaataactctgccggatgccatcatcaccatcaataaatcacgatgtatttatgccattttgatcacggatataacgatacgccccatgcattccggcgtacatttgttatactgaaaaagctgtattccccgtcaaacaggaggttctatgccacttgatcagcaagcccttatagcacagcttaaagattcaaatcctcgttttgccgcactgtatctgaaacatcatcagttaaataatgaaattgccgagcttgaaggcccgaacggcgcaggctataacgacaatgtcgtccggctgaaaaaagaaaaactgcacgtaaaagatgagatgcagcgcattttaacggagtgtcagtaagtttctcccctgtcagataacgccctttcgcgggcgttatcttatgtctccttccctttcgcaccataatctgacctgacgcaatctattgcacatcaaaagatgcataataattacatctttactatccgaccggagttattatgtctgagaaagcctctgtccatggccacgaggtcatgaatatgattattgaaagcgggaagaattacaccacagaatcacttatcgccgatattcacgccacgttcggcgaagatacccgtttccatacctgctcggcagagaatatggatgcaaaagcgctggtcagttttctggcggcacgcgggaagtttatcggtactgaagagggattcagcacatcggctgagaaaatctgtaatcactgaacagcgaaaaaagaccgctatctcccctgaaggcacaaaaaccgggagatagcgtttcctgtaacaggaagaaaatcatgattgcgcgttgtcatcatccatccagctgtcatcttcccagatggtctgaatagtatccatcagcgactgtttatcgtcgggggatttcacgccggaaatattaatcgtggtctgactgctttgcgcaatacggaactgcatatccggatataacggcaggatccggcgttttaactggacttcaagggactgaataagatgcgcaggcactgcatttcgtttatctaacagaatttcaatacgcatgatgttgctctccgtaaactgtatgcatatacagtattttatttttaaataaaaagaaagcgaattttaagcacagtatttaaatttatgggctttacagcatgaaagaggagtttctgatggccggcaaacgtattttacgggaaataaaaaccgttacccgtatggtggaactgtatgaacagcgccatccggcaccggcagatactccggaacattaccgcgatctgctggcgtatgcagtgaaacggctggaaaaatgccgttacggtgaagacaaaccagcctgcaaacagtgcccggtgcactgttatcagccaaaaccgcgggaagagatgaaagtgattatgcgctgggccgggccgcgtatgctgtggcatcatccgatcctggctgtccgtcaccttattgatgacaaaaagccggtaccgcctctgccgcagcgccgccgctcgccccgcaataatcaggactgacgcgcgcggtattccgcctgtgtgatcttatacagcacatgcgtctgtaacggatgcccctgttccagtgacggatgcagaaactcccgctgataccgcattcccgttttcaccatcacccgttcagaaggcagatttaccttcgcggtaaacgcgacaatctccggcatattcagcgtcataaaggcatgttgcagcaccgcgtttgccgcttcggttgcataacctttaccgtgaaagcgtttcgccagacgccagccgatttcagtacacggactgaaatcaaacggcgcggacgggatattaagaccaacaaacccggtaaattccccgctgcttttttcttccgccacccatagcccgaatgctttctgccgttcaaaacgacgggtaatttcatccccatcgcatcactttctgccgcactcaggcaggccggaaaaaagcgcataacgtccggatccgcattcagtgcacggaacggtgcataatcatccggtgtccagggacgcaggtgcagacgcggggtaccaagagtaagcatataatcctccggttcattcagtcataaaatataccggaggagtataacggatttacgtgagggcggcgcggttacacgcgcttaaagacagacgggactgtctgcggctctttgttttttccgttaccgttctgtgacgacgatttcggcgcggattcctgtgatttttccgccgctgcgtctgatttttcagactgcttcagctcagtcactgctgccggcttattattttccgggcgggactgcggtgcctgtgctgcggcagccgctttaccggcaggggcatacggctctgactggccgataaaggtaccgcctttgcggatagagaaattagaggcgcggcagacgccgttaagctcaccgtgctcaagaatttccagctgttcgacggtacaggtgccggtcagcacgccgtcaatcagcagggtttcggcaaaaatatccccttccaccacaccggactgcataatgctgaccgagccggaacgggctttgatttgtcccttaattttaccccagatttgcagattaccgctgatttcaacatcaccggtcaggcgggtttctttgctgatcaccgtcggctggcgggattcaagagacgccagcggacgctgtttctcttcaccacgagctgacagcaactgggtaatttcatttgcctgagcactgagttcagccgcttttcgttcttcttcttcttcttctctttcttctctggttttttgcaacggtgccgcaaccggctccgtttcaggggtatctgcttgttttttcttaccgaacatgacgtttttccttttcctttccgggagaatcgtaatagcacagataacggcggcgatacctgttaaataaacaggccacgatgcgtgcccggctatcactgcatacagtaacaatccccataaaaaccaaagggatgtcagcataatattaagcatggcagacctttgtgatggtatttttacgttacggaagatacttttgcatattgtacgcagccgccgcgccggtaaagggcggattaagaccagtatcagtatgtaatcagggaaatagagaaagcggtgactatagccggatacactccgtgtaccctgtgacagcatcccttcattacaatccgtcaccgccctctcaggggtctaccttaactgaagagggcagaataaaaatatcacaattacgacaggattttatccctctcaggcccctttagtcccccggatttttccgccttctgccgctaagcggtattgtgccagcgcctctgcctcttcaggttcatgcgtgaccagaatcgtggtgatcccttcttctttcagcagattaatctgcggccataactgcctgcgggtcgcccaatccagcccggaaaacggttcgtccagcaacagcagtgccggcggtgagatcagtgcgcgggccagtgccacccgctgctgttccccgccggaaatctgatgcggaaaacgcgccgccagatgtgccacctgcattttatccagcagtgccagagcctgtgatttgtcccgctttaacccggcggcatactgtgccagccgtaaattgcccagaaccgtcagccacggaaacagccacagccgctgattaagataacggcaggggcgtttccagaccggcagcggatccaggggaacatccccgagccggatggagccctgataaggcagataaccggcaatgcagttcagtaatgtggtttttccgctgccggaagggccgcagatcgcggtacattgtgcgcgcggcagtgtcagcgagagatcctgcaggatccccgcactcagatgttcaacgtgcagcatgtgaaggttgccttttcagccggtgcaatgcgaccagcaaaacaatcgccagtgccatcaggatcagcgcgcagccgagcgcgagtgaaaaatcaccgctggcaatattaagataaattgccattggcagagtttcggttttaaagcgggtggcaccggccagcatcagtgtggcaccgaactcccccagcgcccgggagtaggcgaggatcccgccgctcagcaatccctgcagacacaacggaatttccgccagcagcagggtttttccgggggtcagcccgagattcattgccgtgcggacatatgccggatccaccgaggcaaacgccccctgcgccgaacggtacagaaccgctgacgcgacataggtctgggcaataatcacacccaccggggaaaacagccagcgccccaactgcgggaaaattccggccagcgggccctgactgcccagcagcagtaacaacccgataccaatcaccagcggcggcgtgaccagcgggacatcaaacagcgcatccgccacccgcttgccggggaaatccccccgcaccatcacccaggcggccggtacggcaatcagaaatgccagtaccagcgatgtcagtgaggttgccagcgacatcagcaccgcaaaatgaaattcagggtcagtaatcagcttagtcagcaacgccggcgttacctgaaacagtaacgccagcagagacccggtaatcagacacaacaacagtaacaggggcaccagcgcccatttcatcaccggatacatcggtaataccggaatcagtgtgcatcagccggtctgaccggcagaaaaccataatcggtgaaggctttgatcccttccggagaggaaaaatactccgccagttgttttgcttctgccggggatgcactggtgctgagtaccgccagcgtagccacctcttccgggctgccttccggtgacggcagaataatcagtttatcgtggtttttcatggcatcggcgcggccgataaccgcagcatccacctcaccgttaagcagatacatcgacaggtgtttaatcgttgccgcccggacaatgactttttcccgcagtgcatcaccgtaaccgctggcatccagtaaaacttcaccgctgcggcccagcgcaatggctttcgggtcccccatgccgatacgcagattacttgcggcaagatctgcaatactgttaattccgtctgctttatctttgcgtactgcaatcaccggaatatgccggacgatcggataactgtctgtcacctgtttttctttccgcagcttttccacgtaatccgctgatcccgggaaaaacagatcaccctgctttgtcagttcaaaccgggtcaggatctgtccggaaccgccatattccaccgttaccgtattaccggtctctctttcaaactggctgatcaccttttcaaccggcgggcgcagaccggcgccggcatacatatgtaactcagcggccaccgcggccggtacggaacaacagaacagtaatgcggagagcatcagacgacgggacgacatagtaacctcactcgttatatatttttttatataatgattaaaaacggtgagtggtgcaagggacagtcatcacgaaacggcgtatcatctgtcatgtccggtggcgttacccgccggaaataatccgcgatacaaataatatataaattatatattcaccagaaaaattttaatcagctatatgcagcataataaaaacataaaattaaaagtgataacatcaataatcataacagaaacaatcattacatttttgcagagtaatactctgcccttcgccggtaacaacagtattaattaatatccgctcaatatatccatcaataaaacagattcaatgataatgaactgtatatacaccccacccgcaaaaaaacataacaacaacaaaacagcatcattttagaaacataattcataatgacattacttgttattcagtgaagttattcatcatgtaaataaaatagcacccaaaccaataaataaagccgttaatgtcataaaaactaattatcaagtagaaaagcccgatattagttatataattatttataccggatggtttggcactgtccctgttatttaatttccgaaaattaagccatattgttcactctgagatgcccatgaactcacgtactttgacatctgacaataataaagagatacaatctgttattgttgagcccgatattttcaatattaccgaacaacaggaaaaaggtctttaccttctgatgtccggaaaaatgaaatggcaggattgcataaactcatacacacttaatgacaatgaagttattttctccaatcagggaagctatgcataccagcatatttccggcgaaattaacttattatgggttccgctgaacaaccattttctgcgggattttcttcaccgtttttctgatactctcagccaccttcaccgtgttactgatccgacatccggactcatttattttccgcagtccgctatgctgaaaaacagtatcagcgggttttatgatgcttattgtaataatgcgccatcaccgctgataaagctgaagctggaggaattattattaattatcgccctgagtgaagaaggcacacgtctgatgtcggtattgcgtcagctgagtaaccgccaggcagaacgtttgcagagcttcatggaaaagcactatctgaaagactggaagttaaatgaattttccagagaatttggtatgggcctgacaacattcaaagagctgttcggctcggtatacggtacatctccgcgggcatggataagcgaacggcggttgttattttcccatcagcttctgctcaatacccagatgagtatcgttgatgtctcaatggaagcagggttctcaagtcagtcgtattttacccaaagctaccgtaagcgtttcggatttacgcccagcaaagcccggggtaatcatataaactgacgaattgtgataaaaacagaaaacaaaaataataccggaaaaaaacgggtctgttaagctgcgttcctttgcttcacttttattcgccagagggatttatgcttaataaaacgatgtatcatctttatctgtcagatgatcgaatatataactcagaagactcctgtaaagaaaatgatttattatctgaatatcttacacgtcagcaggcagacaacttaaaaacaacagattggttccgtcgcagaaagaaatggaatattccttttcagtatcatgacctgaccatgatcagacagacaatacagacttaccctgataactgggatgcctgtttgtctgacacaattatattatctgcgtcccgttactggattgatggattattaaacgaaacgtatgaatactggataaaagacacacaccgtgagctgtgggatctggaagaagaatataatcaacgcagaataataaaccgtcagctggctgccctgcatgcgctgtacagtgcatattatccgcagacggagcagtcagagctgtcagatatcaaaaacagtttcgcggagtccgcacaggatctttcccggacagagcataatattcacactctccggggagaaatttcgttcacgctgcgtcattttgttaatctgttccgtgatgttatttatcatcataagtccttgcaggacaaccgcattccggactatttccgtactgccgtacagctgattttgcagctgaaaaacaacaatgatgatgaccggctgtatcagtggctgaacagccgcaatatctgtctgacgacagataaaatatactggtgctgacagcaccggcaaatataccggataaagggatagcaatatcccttttatctgactgcatatagcaataacagataaaaataaaatagtgactacgacgggaaataacacacgaacggcatttgcctgacaacctcaagaggattgatatttatgtaccgtcacactgaaacgactgctgtcacacctgtgtttaccgatgaacgccggttgttatggcagacactggagacattccctgccgaaagtcaggaataccgggatatctgtgtaagtttactggctccggtgatttgtgatctgaaaaaaacaaaacataccggacaaatcaccagagactcactcttacaaatcctgtcccactatgatgaatacggcgaacagcaggaatttattttgtcccggctgtggcagtcactgccggcgtcattatctgacagtgacctgaaatcactgattgccaccgaaatcaatcagttgctctatgtgaataaccaactgactttctctcagtttaatctccgctgatacgccgcattaatccggcaaaatggcaaatgaccggaccgggaacccgcctgcattgtccggctttgccacgatattaaaaatcaccgcacctttggccgggactttatcgagattggtcagcagctctatctgatacgcatcctgatccaatacaaaatattccgcccggagtgcactatttttgcggaaatcctgcgccgaatcggtatcaaaggtttcatgccccacggcgctgatcccgcgctcacgaaacagaaattccagtgcgtccattccccagcccggaatatggttgttgccttccgcatctttattatccatcagtgcctgtgacggccagcgtttgctccagtccgtgcgcaatgccacgaaactgccgctttcaatacgtccgtgaatctgttcaaaagccagtacatcgtctgcggatagcgcaaaatctgcatctttctgtgctctggcggactgatcaatcaccaccagcggcaacaccagctctttcagttccagatcatgcacaaagcgccgcccctgtacaaaatggcacggcgcatcaatatgggtgccgtactggccgggaaacgtaaactgctgggcaaaaaagccgtcacggtaatcaaacagcgttttaaactccgccggttcaaacataaaaaagtgcggtgagtccgcattaaatgcgtgtgtcaggtcaatccattttttggatttcaacagattcacggcttcagttaatgataatgacattctgccccctcaatgttataccggtagttgttgtgatttatgctctggttatcagtcagaatttacacggcttgccggggaagtcatttgcagatatttcatgttgttgtccgcaccggacaaggggaacacaatgttaaaagtgattgctgaagattttatgcagccggatgccgttgagatcctgatgccgatgtatgaagaactggttgccgccacccgccgtgagccgctgtgtatcagttatgatctgtttgtcgatcagaaagacccggggcattttgtttttatcgaaacctggccggatcaggccgcgctggatgcccattgtgccagtgagcacttccgccgcctggtacccgccattaataaatatcagcgtgccgaaccgcgttttatcctgatggacagcgccgttaagtaataatcagggcggatatccccgcccttcctgattcagtcgtggtcgattttcgcttctttcgctgccgcctcacaccactcaatgatggcaggatgcgccaggatccggtcaatccatgtctgtgccgccgctgaaaacggcagctgataagtccgtgcccgcagggccaccggcacataaaaagcatccgccgcactgatattttcccctgccagccacgggccaccgaaccgggttaatccctcacaccagatcttatccagacgctgacactctttctgtaattccggtgtcatctctgcggccgggcggctttccgagcagttcagcgggcactcacggcgcagcgtggtaaacccggaatgcatttctgccgcggcagagcgcgcccaggcacgggcggttttttcctgcggccagacatgcggataatcctccgcaatatattcacagattgccagagaatcccagaccgtggtatccgctgtcaccaggcacggcaccagcccggacggggaaaagcggagaaatttctcataactgctgccgcccggtacaaaggtggccaactgttcatcaaacggaatattcagggctttcagtaaaaaccagggtctcagcgaccaggaagagtaatttttattggcgatccacaattgcagagacatataacccctctcagtgaaattaaaataaatgatataaacagcaggctgattgccttacccaatgtatccggtttttattccgctgccttaaaaaaggataaatcctgttcatattctttctgatagtgcccttccgtacccagcgtatcctgcaaaaaatgtaaaaatgcggagacttttttcggcagatattcacgatccggataaaccgcatagatgtgatgccgtggcagcaggtattccggcagcagcgggatcagccgcccggcgcggatatccggtgccgcgataaactgcggcagctggcagatccccgttccctgtaaaacagcctgatgcagcgccagactgttgttggcacgcagagtaccctgcggggtaaaacgcaccacgtctccccggtgcagaaatgtccatgactgaccggcctgaaaatagctgtaaaacaggcaattatgagatttcaggtcagtcagattctgaggtgtaccatgttgtgccagataggcgggagacgcacacaacacgctgcggcagggagataacacgcgggcaatcagagaggaatcctgtaattcaccgatcctgacagccagatcaaacccttccccgaccaaatccgtcagtttgtcatcaaataccatttccgcctgtaatgacggccagcgctgtaaaaattcaggtattaatttagccagatgcagactgccgaacaccgccggcgcactgattttcagtgtgccgtcaacctcacggctgtaatgtgacaacgcatcctgcccgtccagcaccgcctgatgggcttttttcagataggtgtaataaagctgtccggcttcagtcagttgtaaatggcgcgtggaacgggtgaccagccggatgccggtttgagtctccagcgccgccagttttttactgaccgccgatttggtcatatgcagatattctgctgcttttgtcaggcttccctgctcggtgatcgcaataaacaccggtaaaagtgaaaaatccatcgcagcccctttattgtcaacttacaggaaactctatttttctttttatagcgtttattccgggccccggcaatctctatactctctccgtccgcaataaagtgaaaataacgatgaaaaaagagatcctgttaccgctgatagccttactttccggggtattactcaccctgatgattatgagcaacagctatttatccacctttacttctccgctgcacgcctcctggctgacacacggcatcggtgccattgttgccctgattatctggctgacagtgaaaaagcacctgccgacacgccacgccggtacaaaaatgccgctgtggtgctatctcggcgggatacccggtgcgtttaccgtactgctggcggcgatcaccgttaacagcccgctgtcactctccggctcgattgtactgatgcttgcggggcagatagtgaccgggctgattatcgaccattttggtctgatgggactgacacggcgcaaagtgacaagccgcgacgggctgacactgctgctgttattcagcggctgtattttgatcattgcaggaaaataatgatgttactgttttatattactatcgcgctgacaaatggcatttgtattattttcagccgcagtattaacggcagattatctcagagcagcaatgcgttttatgcctcgctggttaatcatattgccggttttatctttctgagtgtggttgtactgttttacctgccgcagttccccgtcacactgaacagtattccgctgattacattcaccggcggtattatcggtgcctgtttcgtggtgataaacagttatattctgccgctgctcggcgccacactgaccaccattctggctatctgcggccaggtattatccggctttattatcgatatcatacagcacggcatgccgtcacatctgctgatgcagataaccggtgtcatcttaatcctgctggctatcgctgtccgctaccggaagtaatttttcttatttcgttactcagcgaagtgttttctctgtgcttccgatatgattagccggactgcataaggagaatcccatgtttgctgtaatttttgaagtaactatgccggaaaacaaacaatcccgctatctggatatcgctgccggattacgcccgctgctcagtgacgcagagggctttatctccattgaacgttttgccagcctgagcacacccggtaaattattgtcgctctcattatgggaagacgaggcttctctgctgaaatggaaacaaaacctgcagcaccggcaggctcaggaagaaggtaaagcggatattttctctttttaccgcatccgtattgctgagatcacccgtgaatatgacttcgggcaggaataaccggcggagctgatatgtcagaagaacacgcacctgagttagaaaccgcgcttgccggtgtggctgcggcactggctgatccgtcccgtatccgcatgctctgcgccctgatggacggcagagcctggacagcaactgaactgagcattgccgcggatatcagtgcctccaccgccagcgcccatctggcaaaactggtcgccggaaagctgatcatctgtattccgcaggggcgtcaccgctattatcagctggccggattaaacgtggccgaaatcatcgaaaaaatgatgaatctcaccggtattccggtaacagccgccatccgcaaatcctccgccccgccgcatttacggcaggccagaacctgttatgaccatctggccggggaaacggcggtggctgtgtatgatgcgatgcaggaaaaagggtggataaccgctgacggtactatgctgacaacggcgggagaatctgcactgaccgcactcgggctgcctgccgctcacacggtaaaacgggttttctgctgcggctgtctggactggagtgaacgccggtttcacctcggtggctatctgggcgccgccctcttcactcactgtgagcaacagggctggctgacccgcacaccgggctaccgtgaagtgacaattaccggaaaaggaaaaaaacaattccggcaatggttagggattcagatcccgtaattatgaacttctgaccagtaataacgataatttacgggcgaacggcagaacaaataagacggtcgggaatgcaatggcccaggatataccccatgacgtcagccacggggaaaccagcagccaggagaatcccagcgctttgacggtactgataaacgaaacaataccactcataaccagcgataagaaaaaaggcaccaggaagattaacgcgcgctgaggcagcttcggaaaacctaaaatatagtttttgtcctgaaaagacatagacgactccgtatagtgacgacacaacaacacataactgttgtaatgcacaaagttacatgcgttgattaacgtaaacgcttacgggtcagagaattgacctttgatggcgctattctatgaatctgaatgtgtttgtcaaatgcaatttattctcaataagaaaaataattgcggttactcagtcatcatcagaaaaattcaggaaactgaacatactctctttataacgggtagtggccttcagcatttctgtaccagaaatatcctgcaaacgcccgtcatgcgccattttccggaggtcatcaacccggaggtcatcactcagcagcgcgcgtaccgtcatattatccggaattaaatagatcggtccgcgcataagctgtgatgcgcccagccggtcaaaataataatattgtccgcctttctgccagacctccccgtaatggtgagaagtaatatcgccgattttttcccagttatccgttgtattatcaccgagacgataaagtatcgtactgcgggaaataagacccggtgatttccggccgccccatgattctgaaccctgcaaataccgggtttcattgccgcaggtgaaaatcagcggtgatatttcccggcaactatcctgcaatggcggattatcaccggcgcggcggattttttcttttttccggtcataaaagtaaacgccattccgggataaaaacaatccctgatttacatgctgaccatagtaactgatcacgcggtaaggcgcatattccggcgggaacatgacattattcatggccgcctgaccggtttgcggatcaaataaataggcttcctgaaataaattaccgaggtaaaaaccatacagtgattctgtatctttcagcggtaataaatggcgctgataataaacatgttccccgtcgtgataaaacaccctgctctcacgcactgatttatcattctgccggacagccacaggacgcaatgtctccgggtttgccgccggcattaatttaccgtcaaagaaaacctgttctccgttactgacaagcccggaatccgctgatatccggtaaggtgtggcagacggtggcaactgttgctgcggataatagtaagtcagaggcttatcactcagtccccagccgtaacgccattgctgatacagcttttgcaggccggtcagttcattatttatccgcgtataaggggcacagaaaaccgtatttttaccatccgtaaaatagccattcccgatagtaaccgccgtctgaggattaaaatccgcgacgggaagattaccgcaccaggcgtgatatttatcggctgcaaattgccggccattgtggttgttattgtcaggcaataatctgaaactgtccgggtccgcaccggggattaaaaaatacccgtcagacggaacagcggcatacacccgaccgtcatacaatgtaaaaacggagtgcccgaatgatttcccgttccggtcaatatcgtaatacggtgttttatccatggccagaatgatcccggatataaacaggacggagaccagcataatgccggacataatgataagaacaaggcgtttgcgggctttcataggatggaaatagtatccgaaagcattgccgtctgctatcagagaaaaccatttttcagcccggaatcatcatctttccggctgttataccagtatctgcttcataaaaattgtaataaacagatccagcggttcaccattacgggtcagtttggcacgcatgaccgccccttcccagcccgcccagaaaaaagccgccatctgcctgcagtcagtatttccggaaataagattttgcgcctgtgcttccagaagacaattctccactttcttttgccagccggtaataatgtcattgagtaattcacaatacccggccggcagactgataacttcctgcccgagattgccgatcagacacccgcgctgccagtgatatttttccattccggatttggcaatcctgcaaaatgtcaataatctttccggtggcggcaatgtggtatcagacagacatttatccagcagatgagaaaaacagcggtcataatgacgtatcactttcacaccgaaattttctttactgccaaagtaataataaaaagatcccttcggaatacctgcttttgttaatattctgctgatatctgacgtcatatatcctgtttcggtaaacacctccgtaccgctgcggatcaatatttcttttacatcggtacctgcatcatggtttttcggcggtcgtccccgtttcggctttgtcattattgctgtcattacgttttatctctgttatgcggaatatacagattgctgttcgtatacattccggctgtttcgctgcaggaaaaaatcctcccgccgttactgcacgggaggaacccaccggagagtgttcgttatttcatcattacgtcctggttttgtttcatttcaaaccgcggggaaacaaaaccatacagtgtccagccgaggaaggtggcaagcgccccccacatcacagcatcttcaccggatgaatacagcgcatagaaactataaacagcaccgataaatgcaatcacattgcctgtccgtgctttcttaggatccacattggcgactttctgcagaataatcatggcagccatggaaaggatataagggataatattagtaacaaccgccaggttaaccagcacattgaactgtttattcagtgacggactgatggtcatcagcgacagtgcagactgaataataacaataaccagcataccttttaccggggcatccgctttggtaacagcagaaaagattttcgggaaataaccggaatcggatgatgatttaaatacctgcgcaatggtgaactgccagcctaataatgaaccgcagcaggacataatcatcagcgccataacaaccttacccacacccggcgtaaacatttgtgagaatgccaggccaaacggtgcagtagagtttgccagatccatattcggtacaataccggcaatgacgtttgttgatacgatataaataaccgctgcgcctaatgttccgcccaatactgctatcggcacatttttctcaggattatcaaccgcctcactgttagcacaggctgactccattcctaaaaatgcccataatgtcatcgcaatagaggaaccgaccgcctcaaaaagcggaaaattatgcgggttccaggaattaacatacagttcaggactgaaccaccaccagccgataaccgaaataccaacaaccggaataatgaccccccagacagtcacactgctgatccgtccggtgatccgtgcaccgccgaagtttgccaccgtacaaatccacaacacaacaattgtggcaatacagatacccagcggcgtcatcgccgcatccatcagttcagccccataaccgacggctgaaatcgcgatcgcaacgtttgcaatcagcagagaaacaccataggtataattcgccataaagttaccggatttaccgaatgcgtattccgcgtaacctcccatcccgccgctgcggcggctgtacataccgcacttggcaaatgcataagccagagccatagaaccgacggcggtcacaagccatgacagaatagaaaccgtccccacttccgccagttttgtcggcagcataatgatgccggatcccatcatattcactgcggttaatatagtgagctgtaatacgctcattttattctttgaagcactcatcatatttctccccggctgacggagcacgctcatccgcgctccgccatgcacgaattaacgaactcagtgtttaattacatagccgtatgcccgctgacggccatcttcatcacagcggatatacacaccctgtaattccggtgagaatcccgggaagaggttaatcccctcctcgagcgccagaaaatattgctgcacggagccgccccagatttcccccggaaccacacacagaacccccggcggataaggcagagcaccttcagccgcaatacggccttcaatctgatccaccgcaaccaattccgcgttgccgcgtacaaacgcaatattcgctgcctgcggtaacatgctgacctgcgggaagtgtgatttgcggaacatctctttctggagttgtttcacattaaacttcacatacatatcatgcatttcctgacataactgacggatggtatacccctgataacgggcttcatgcgcatgatatacagacggcagtacctctttcagcggagcatcctgttccagtaattgctcaaaacgggcaatctgagccaccagatgctgcatttttgccatgctttcagcaggtgtcagcaggaacagaatggagttgagatcgcatttttcaggaatgatattattttcacgcagatagttagccagaatcgttgccggcacaccgaacgcttcataattaccggttttggcatcaatacccggcgttgtcagcagtaatttgcacgggtcaacaaaatactgattttcttcatatccctcaaaggcatgccagcgctcacccggcacaaaattgaagaaccggagatcattggcaatcacatcagtctcaaaatcgccccatgaacggccatcaatagtttccggaatgaacgggcggatatgtttacaggatttcagcagcaacttacgggtttcaatcccggttttcacgcaatccatccataaacgcttacctgatttcccttcatgcattttggcgttcacatccagcgcggcaaacagcggatagaacgggctggtggaggcatgcatcataaaggcattattcagacgcttatgattcacataacggctctggcctttaatatgactgtcttttttatggatctgagatgtctgagagaaaccggcctgttgtttatgaacagattgtgtgaccagaattccgggatcattttcattcagctccagcaaaagcggagaacaatccttcatcatcggaataaactgttcataaccaacccaggcagaatcaaataaaatgtagtcacataaatgaccgattttatcgacaacctggcgtgcgttataaattgttccgtcatacgtacccagttgaataaccgccagacggaacggacgtttttcgccggttcgttcaggtgcgacttctttaattaagctgcgaagataatcctcttcaaaacaatgagcatcaatcccgccgataaatccgaacgggttgcgcgcagcttccagataaaccggtattgcccccgcctgtattaatgcgccgtgatgatttgatttgtggttgttacgatcgaataataccaggtcacccggcgccaataaggcattaagcaccactttatttgaagacgacgtaccattaaggacgaaataggttttatccgcgttaaaaactttcgccgcatgctgttgtgccgcgcacggagccccttcatgaatcagcagatcccccatggagacatccgcattacataaatcagaacggaataaattttcgccgaaatattcagcaaactggttacccagcgggtgacggcggaaaaactccccgccctgatgtccgggacaatcaaaagctgaattgccctgctcaacatattttttcatactgccgaaaaatggcggtaacagactttcttcatatttcagcgccgctgtttccagttgcttactgtataattcaccgttctttttatttaaatcaatcacgccggttaaccgtgtaatgacatctgccggaatgacttcgtgatcactgattacagcaaaaaccggctgttcaaaactgtgctgctcaataaaatccagctttccgtcgcggatatcatcaagtgaaataacgatgacagcaacatccgtaaaatctgtattcaggatatccacacattcccggtgtgttgaaatatagtcagacatatcatagctgacagcgattttataacttttcattttcataccttttatttttggcaaaaaattcccgctgaaatattcagaaaaaatatttcagttatttattttcataaatgcgagcttgttccctcaatatactattgagttaaaaaatcacatttctctttatgccattacgtatgccaaaacaatattcaggactgacagttttcactatctcagcaagggctttttttaccgcaaccgggaatgacgaaagctgtttacctgcatattgatatgcatgaaaaccagagtatgaattatcaatcagaattcagcatatccacacataaatgcgggatataatgagaaagaggtcgacgatccatacgatggcaatatgcagacaacgtcatggatgtcagtagagggactacctttgtgcattaaaacgattaaaatcaaaacacgaacgatgtgagaacatcataaggtgtgtaacacgtcttatatgcggccaaaatcggttattgttttccatttttgcacctgtttaaaattaagactatctgacgaacaattattaatataaccaagtataaatactataccgtgatatacatcaaaataataatcctaaaaatatatttaaccaatatcagttagtataaaaatacattttgttaatactgtgttgtgtatattattggcgaaaattaaaaaaacaaatacatatttaatatagttactacgtctatattatagataataactaatcctctgataatatagtgatttggtctataatcattatttataagataataaaatataatcacgacatatatatttaatcaaatcgcactaatagtttaattttaaattaaggtgcaataacagtaaattataaaaaatactattttatgaccgggaaactcgtaaaattaataaagtattatttttgaataattattcatttcagtcacaatatttctccgggccggtaaatatataaaacagtacgaagccggagcgcaatgacaagcgccattatgctgacacagacacatgtgtggctgaatcagagtttcagacatacgggatgagatgcaccggagagattcagttgccggaatatttgataacacaggaagttaacgaagaaaactggagcgggcgaagggaatcgaaccctcgtatagagcttgggaagctctcgttctgccattgaactacgcccgcgtcaggatgtgtgagattatacgccggtcatcttgtttatcaagaggatagtgaaaaaaaagccccacaaatttgtgaggctccgtgttcatttactgcagcaattatttgcccggacgcatcgcagggaacaggataacgtcacggatggtatggctgtcagtaaacagcatgaccatgcggtcgatcccgatacccagacccgctgtcggcggcagaccgtgctccagcgcgacaacatagtcttcgtcatagaacatcgcttcgtcatcaccagcgtctttctggcggacctgctcggcaaaacgttctgcctgatcttccgcatcgttcagctcggagaaaccgttaccgatttcgcggccgccgataaagaattcaaagcggtcagtaataaacggattgtcgtcattacgacgcgccagcggagagacttctgccggatattcaatgatgaatgtcggctggatcagatggctttctgccacttcctcgaagatttcacactgtacgcggcccagaccccatgatttttcaattttgatgttcagggatttcgcgatagcaaccgctttatccatatcatccagatcagccatgttggtttccggacgatatttgcagattgcttctttcatggtgagtttggcaaacggtttgccgaaatcgaattcctggtcaccgtatttcacgaccgggttacccagcacatcctgagcgatggtgcggaacagctcttcggtcagtacaatcaggtctttataatcggcatatgccatataaagttccatcatggtgaattccgggttgtgacgcggggaaaccccttcgttacggaagttacggttgatttcaaacacgcgctcaaaaccaccgaccaccagacgcttcagatacagctccggcgcaatacgcagatacatatcgatatccagcgcattatgatgggtaacaaacggacgcgcacttgccccgcccggaatcacctgcatcatcggagtttccacttccataaaccctttgttcaccataaacttacggatttcagccagaatacgtgaacgcaccgcaaaggtatgacgggattcatcgttggcgatcagatccagataacgctggcggtagcgggtttcctggtcactcagaccgtggaatttatccggtaacggacgcagtgctttggtcagcagacggacttcagtgcagtggacagtcagttcgccggttttggttttaaataacttaccgcgcgccgcgaggatatcgcccagatcccattttttaaaggattcgttgtacacgccttcagccagatcatcacgggaaacgtaaatctgaatacggcccgcagtgtcctgtaaggtggcaaaagaggctttacccatgatacggcgggtcatcatacggccggcaatcgccacttcgatattcagggcttccagctcttccgcgcttttttcaccatatttttcatgcagctcaccggataccgcgtcacggcggaaatcattcgggaatgcaacggcttctttctcacgcaactgtgccagtttttcacggcgtgtttttaattcgttatttaaatcaggtgcctgctcagcactgtgttgatcttgtgacatttttaatccttataaacccgcttttaagctggcctcaataaatttatccagatcgccgtctaatacagcctgcgtattgcgggtttccacaccggtacggagatctttaatacgggaatcatcaagtacataagaacggatctgactgccccagccgatgtcggatttgttatcttccatttcttgtttatcggcgtttttcttctgcatttcatattcataaagttttgctttcatctgacggaaagcctgatctttattcttatgctgcgagcggtcattctgacattgtgtgacgataccggtcggaatatgggtaagacgcaccgcagattccgttttgttcacgtgctgaccaccggcaccggaggcgcggtaaacgtcaatacggatatccgccggattgatttcaatatcaatgtcatcgtccacttccggatagataaacgcggaactgaacgaggtatggcggcggccgccggagtcaaacgggctcttgcgcaccaggcggtgaacgccggtttcggtgcgcagccagccgtaggcgtattcgcccatgatcttaaccgttgccgatttcagaccggccacgtcgccgtcagattcttcaataatttcggttttaaagccgcggctttctgcccagcgcagatacatacgcagcagcatgcttgcccagtcctgagcttctgtaccaccggaaccggcctggagatcaaggtagcagtcagcgctgtcatattcaccggagaacatccggcggaattccagctgaccgagtttgtcttccagtcccttcagctcttcaacagcttcgttaaaggtctcttcgtcatccgcttcgacggcgagttccagcagaccgctgacatcctcaagcccctggtcaaggtcatcaatggtttccacgatggcttccagagaggcgcgttccttaccgagtgcctgggcacgttcaggttcgttccagacgtcaggctgttccagctcggcgttaacttcttctaagcgctctttcttggcatcgtagtcaaagatacccccgaagcaccgaagtacgctcagtcaaatcctggatctgattttttaccgggttaatttcaaacatgtctttttatcttttgttgattgtcaggtaataatgtgagaactgcacattgtagcgaaaatccgctcatcatgacagcactgcaaccccctttcggactaaaattaatccggccagatatgttctatcagtaactgcacactgcgctgtccacggaactcattcacatccagtttatacgcgagacgaacccgctgcacactgttgtccggccagtaatttacatccacattaaaggcgattccgtcgagcagcggaccgccgccttccggttcaatcatcactttcagatgtttttcgccgacgatgcgctgttgcagcagccggaatgtgccgtcaaacaacggctccgggaacccctgcccccacggcccgccttcacgcagcaaaccagcggtttccagtgtcatatcctgcggtgacagcacgccgtcgctccagataaccccgtgcagcaagccggggtcaatcatatcatccaccagcgcggcaaatttatgctgaaaatcagggaaatacgattccggcagagaaagcccggccgccatcgcatggccgccgaatgcggccatcattcccggattgagcgtatcaagccgctcgagcacatcccgcagatgcaggccgcttaccgagcgcccggagcctttcagcagaccatcaccgcaaggagcaaaggcaatcaccggacggtgataacgctctttgatacgcgaggcgagaataccgaccacgccctgatgccattcagggtgatacagagctatccctgacggtatttccgtggtgctgtgctcaattttgctgaacagtgtcagggcctcctgctgcattccctgctctatttcgcgccgggtctggttcaggccatccagttcatgtgccagcatgcgtgctttcgccatatcatccgtcagcagcagttcaacaccgactgacatatcatccagtctgcccgccgcattcagacgcggtccgagcgcaaaacccaggtcactcgccaccagtgcgggagcctgccgtttggagatctccagcagcgcggtgatcccggcacagcagcgtccggcacggatacggttcagcccctgatgcacaaggatacggttgttctgatcaagcggcaccacatctgccactgtgcccagtgcgaccaggtcaagcagttcagccaggttcggctcggcaatattctgttgtgcgaaccagtcgtccgcccgcagtgatgcccgcagcgcggacatcagataaaaggttacgccgacaccggcgagggatttggagagaaatccgcagtctgccaggttcgggttaataatcgcttccgccggcggcagaatctctcccggcagatggtggtcagtcacaatcacgcggatcccggcagcatgagcagcggccacgccgtcatgagaggaaataccgttatccactgtcataatcagctccgcccctttgcggcgggcctgctctgtcacctgtgcgctgagcccgtagccgtcctcaaaacggttggggacaagaaaatccacctgccggaatcccatccggcgcagtgcacggaccgacaatgccgtactggtcgcgccgtcagcatcaaaatcgccgacaatcacaatccgctgattctggtgcagtgcttctttcagcagtacaacggcctggtcaatgccattaagctgaccgtaattaagcagcccgcgtgcaccgcgctccagttgctccgcagaggtaattcctctggcagcatacagacggcataacagttcggggcgatcgggagaaagcagtgctgtgtaatccgccgcatcacggcggcggagttctgtttttatcataacaacctgattatactattaattatttatttactaattcagcaattttatccgctgacaggtaaccggcaatcagcgttccgtcctcaaggacaatcgccggagtgccggtgatgccgaatttcaggccgagattatagtgtttactgatatcaatgttacagctgtctatctgcgggataggttcattacggaacgcgttatccagcgctttggttttgaacccgttacaccagactgactgcatttcccggccgacagctgaatccggccctttgcgcggaaacgccagataacggaccgtaatgcctttatcattcagcgccttattttcattatgtaacttcaggcagtacggacaggtgatatccgtaaagacagtaataacgtggctgccgcgctgagatttataaatgatcatctcattttccaggctgttcagctcatccagcagcacattattggtgatatttttcggggttttgccgctcatatcaaacatcggcccctgcagcagataacggccgtcatcgctgatataaaaaacaccctgcggggtggctaccgccgagacacccggcaccggtgacgggcggatcatggtggcggtcatatccattttgcccagtgccgctttgatttcgctttccccggcaaccgcgccgtgactgaacacaagcagaagcgccagtgcggatgatacaattttcagcatactgtttccttatcagccgcgcggatggtgctgctggtgcagcgtgcgtaaccgctccgtcgcgacatgggtataaatttgtgtggtggataaatcactgtgccccagcagcatctgcaccacccgcagatccgccccgtgattgagcagatgcgtggcaaaggcatggcgcagcacatggggcgagagtttttcagtcgcaatcccggctacgaccgcatagtgtttgatgcggtgccagaatgtctgccgcgtcatctgccgcccgagtttgctcgggaacagcacgtccgcagcctgtccgttcagcagtgacggtctggcctgtgccagataaacctccagccagtacaccgcttcttcccccatcggcaccagacgctctttattacctttaccgatcacgcggatcacgccctggcgcagactgacatccggcagcgacagtgacaccagctctgtcacgcgcagtccgcaggcataaagcacttccagcatggctttatcgcgcagttcaagcggatcggtaacatccggagccgcaagcaggtcatccacctggctttcgctcaaatctttcggcagccgggcaggcagtttgggtgccgccagctgaatagtcgggtcatccgtccgcagtttttcacggtagcaatactggaaaaaccggcgcagcgagctgagcatccgcgccgaactggtagctttgtaaccgcgatccagccggccggccagaaaagcctgcaaatcaagggtggtcagcgataaccagtccagatcctgcggcgccagccagtccgccagtgcctgtaaatccaggcgataggatgccagggtgttttccgataaattctgttccagccagatagtatcaagaaactgctctgtcagtgcatcactttcgctgtgttgtacggcgtccttcaccgctgacctcccgtttgaattcccgtgtcagaattaacttatcttctgttacaataccgtaatcctgtgatgaaagcagcgcacagaggcggcgggctttcattttttacccgatacacagcagaataaacagatgaaaattggtcttttttatggttccagcacctgctataccgaaatggcagctgaaaaaatccgtgatattttaggtgatgatctcgttgaactccatgatgtgaaagagacagatctgcaactgatggaaagctacccggtgctgatcctcggcattccgacctgggatttcggtgaaatccaggaagactggctggcggtgtgggagcaactgccgcagcttgatttatcgggaaaaattgtcgctatgtacggcatgggtgatcaggtggattacagcgactggttcctggacgcactgggctatctgcatcagcagctgcaatcatccggggtaaaatttgccggttactggccggtggacggttataccttcaccagcccgaaagccctgaccccggacggcaaacactttgtcggcctggcacttgatgatgtcaatcagtatgacgaaagcgaagagcgcatcgccacatggtgtatgcaggtacttgaggaagttcaggaactgctgtaggccgatcagatatccgggtactgtaaaagcagctgattaaggctgctccatgcctctttcgggacactgtcagaggctatccacaggtatttctgccgcccggaggtcagtgagcgcagatgcagacggatacccagccgggtaatatatggcggtttagtgatctcccactcgcttttacgccataaaatccggttttgattctgcagactggcgggaccggcgcgtttgctgattttatactgtgtccgcccccagcctgcgatcagcagcaatgtcagcggcagccagataaatgaggttctgccgggccagggcgcaaataatacactcagcgccagcacaccgtaaatcagtgttgagaagacctgagtattaaatgagacacgtaatactgatttccataaaaccaccggtctgccccctctgtatcctgacataatgacagcacccgctgtccggctgagaacccggttatcccgcgtccgtcagccggaaaatatacggcattccttcccggtttcctatgaaataactgtgaccggttatgactttttctgccgctcagtccggataatacgctgcgttctgtgctgccatccgtgcctgattacgttcctgaatcagccggattatctgatacagcgcctcatcatccggacggcctttattcatcagccagttaaacagatccgggtccgggcagttcagcaactgcacaaaatcctgtttctgagcatcggtcagcgtgtcatattcatgctgaaaaaacggcataatcgcaatatccagctcccgcatgccgcgacggcaggcccagtggatgcgggctttattttcaatatctaacaccggtatatcctttttataagaagcggtttatcagaccggtaaacataactgatgatatcagcgtagcctaccaagccctgacaataaagaaaatcgtctgccgcacatgccggagaaaaatgcgtctcaggcggaaaaataaatgaaatccgcagctgaggatttcattgtcactccgcacgtaccgcatcacacaaagggtcaataatattctcttgcaatgtctgttatctcttttaccatacattgcacagctctccggacaggtaaaacatcatgaacacagaaacaaatacattactcccgcaactgagtgattctctccccctgacacgcatttccctcagcgatctggcgctggtgaccatcaccggcccggatagtcagaagtatcttcagggacaggtcaccgctgatatcgacgctatggctgatgatcagcatgtgctgtgtgcccattgtgatgccaaagggaagatgtggagtgatctgcgtctgtttcattataaagacggttacgcctaccttatccgccgcagtgcgctggatacccagctcgcggaactgaaaaaatacgcggtattttccaaagtgacgattgccgctgatgatagtgctgtcctgaccgggatcgccggtcacggtgcggcagaagtcttacaggcacatttcagcacagttccggatgcggacactcaggttgtcagcagcgatgacaccacgctgctgtatctgccgctgccgcaggggcgttttattctgatccaaaccgctgaacaggccggtgctttatctgatgccctgtctctgccggacgcgtctgacactcagtggaccgcactggatattgaagctggttacgccgtaattgatgcggcaaccgtcggtgaatttctgccgcaggcaacaaatctgcaatcccttccccggggtatctgctttaagaaaggctgttataccggccaggaaatggtcgcccgcgccaaattccgcggtgccaacaaacgcgccatgttcacactgattggtcacagccgccatgtgccagtcgccggtgatgatgctgaacgccaactgggtgaaaactggcgccgcaccggtaccattctcgcggctgtccgcctgagcgatgaccgcgttctggtgcagattgtgatgaataatgatacggaggaagatgctgtcttccgtatccgtgaagatgaagaaagccgcctgagccttttcccgctgccgtactcctttactgaagaagcctgatttcccgtcatccccgggcgcagagataccctgtctctgcgcccggaggtattctgtataaatccgtattgaggttgttatgtcatcagctgttcccgcacaggaagtcattcctttttctcagttaatcacctttgttatggagctggataagctcaaaagcgtttaccgcaaaacccgcctgctgaacaatgaacgtcaggaaaactccgctgaacacagctggcattttgccatgacagcaatggcgtttgcgccgtatgttgaagatgcggatatgctgcggatcctgaaaatggcactgctgcatgatgtggtggaaattgacgccggggacgtgctggtctttgatctggccgcccgcgaagcgattgcggaaaaagaagtggctgccgcaaaacggattttcggcctgctgccgcagccgcaggcggatgagtttcaggcgctgtggaatgagtatgacgccgcagagacccgcgaagcccgtatcgccaatatgatcgaccgcgtgatgccggtgctgatgaatctgcacaacaacggtcagagttgggtggaaaacaacatttcactggaacaggtgattgaccgcacgaagtttattgccgatgtgcatccggcattctggacgtggttacgtgccgaactggataccgcgaagcagaaaggctggctgcactgataaaaaaggccggttgtgttaccacaaccggccttttctttatcgtttaccgtttactcgtaatcactcatcggtgcacaggagcactgaaggtgacggtcaccgtagacatcatccagccgtttaaccgtcggccagtatttgttgtcacgcgttgcctgagtcgggaataccgccacttcacggctgtacgggtgtgaccactccgctgccagttcagtctggatatgcggggcattgaccagcgggttatcttccgctgtccactcgccgctgccgacccgctccatttccgtacggatacccagcatcgcatcaataaagcgatccagctccgtctggctttcggactctgtcggctcaaccatcagtgtgccgccgaccgggaaagacatagtcggtgcatggaaaccgtagtcaatcagacgcttggcaatatccatctccgtaataccaaacttcgctttcagcggacggatatccagaatacattcatgtgccacatacccgttacggccggtataaagcacatcgtaagcggatttcagtcgtgcagcgatatagttggcattaaggatcgccacctggctggcctgacgtagtccctgagcacccatcatgcggatatacatccagctgatcggcagaatggaggcactgccgaacggtgcggcggatactgcgccctgagaggtcagcagctcagaggtaacgatggtgtgtcccggcacaaacggtgcgaggtgttttttcacaccaatcggccccatgcccggtccgccgccgccgtgcggaatactgaaggttttgtgcaggttaaggtgagaaacatccgcgccgatgaagcccggtgtagtcacaccgacctgtgcgttcatgttcgcgccgtccagatacacctggccgccgaattcatgaatgatatcacagacttcgcgcacaccctcttcatacaccccgtgggtggacggataagtgatcatcacacaggacagattctcactgtgctgttctgctttcgcccgtaaatccgccagatcaatgttaccgtcttcatcacaggccaccaccacgacttccatccccgccatattggctgaggccgggttagtgccgtgagcagactgcgggatcagacagatagtgcggtgcccttcacctttgctttcctgatagcggcggatagtcaccagcccggcgtattccccctgtgcgccggagttcggctgcatacacatggcgtcataaccggtcagcaacaccagccagcgggagagctgttctatcatcacatgatagccctgagcctgctccggcgggcagaacgggtgcatattaccgaattccggccaggtgatcggaatcatctccgctgccgcattcagtttcatggtgcaggagccgagcgggatcatcgcctgatccagcgccaggtctttgcgggccagactgtgcagatagcgcatcatatccgtttcgctgtgatagcggcggaagttcggatgcttcagaatctccccttcgcggcgcagcgcggcaggaatggattcagaagaagcggcaacctgtgcatcgagtgcatcgatatcccacagtgcttcctgtccggtcagtaccgcatacagattttccaggcattcacgctgcgtggtttcgctcagggtaaccgcaacggcacccggcagatcggtacgcaggttgatacgcgccgctttggcacgggccagaacggcagctttgtcctgcacttcaatcgtcagagtatcaaaccaggtggtgttacgcagacgcagacctgcatctgtcagcgctttcgccagaatatcggtcaggcggtgaatgcggccggcaatccgtttcaaaccttccggcccgtggtagaccgcatacatcccggcgatatttgccagcagaacctgagaggtacagatattggagttcgctttttcacggcggatatgctgttcgcgggtttgcagcgccagacgcagagcacggttaccggcggcatcaatggataccccgataagacggcccggcatcgcacgtttgtaagcatcacggcaggcaaagaaggcagcatgagggccgccgtagcccatcggcacaccaaaacgctgggctgagccgaagacgatatccgcgccctgtttgcccggcgcttccagcaggaccagcgccataatatcggctgccacactggtgatcacctgacgctgatgtaactgtgccagtaattcacggtaatcatggatctgtccgccggtgccggtctgctgcaacagcacaccgaacacatcatcgtaatcaagggctttttccgcactatcgattatcagttcaaaaccgaaatattcagcgcgggtgcggatcacatccagggtttgcggatgcacgtcatccgcaatgaaaaagcggttggcatttttctttttgctgacgcgttttgccatcgccatcgcttccgccgcagcggtcgcttcatcaagcagtgaggcagatgccagctccagaccggtcaggtcgatagtcacctgctggaaattcagcagtgcttccaggcggccctgggagatttccggctgatacggcgtgtacgcggtataccagcccggattttccagcagattgcgtaaaattaccggcggcagaatggtcggtgcatagccctggccgatgtaagaggtaaattgctgattcagcccggcaatgattttcagttctgccagcgcatcctgttcggttgccccttcgcccacggcaggcgggatatccagctgaatatcatcagggacaatatggcgggtgagatcttcaagtgatgccgcaccgaccgttttcagcatatgctgctgttgttcaggggatgcgccgatatgacggcggacaaattcaccccggttttcaagctgcgttaaagtttgagtcattgttctccggttcctgacattgtctgattcaataaaaacccgaaaaaaaaccctgtttacttacaaacagggttccgcaatccgtcagtcttcttcttcagcctgcagttctgcgtatttggctgcgtccatcagaccggcaaactcatccggatccgtgattttaatacggatcatccagccgccttcatacggctcgctgtttaccagttccgggctgtcttccagtgcttcgttcacggcgataacggtgccggtcaccggcgcatacaggtcagatgccgcttttaccgactcaacggtaccgaatgcctcaccaaacgtgatttcatcacccacttccggtaattcaacaaaaaccacatcgcccagcagttcctgcgcgtagtcagtgatccctgccacatactcatcaccactctcatggcgaacccactcgtgatcttctgtatatttcagattctcaggtatattactcatcgccaacggctcctgttatcgggtttctcaaaatttaacaataaaatacggatgttcagaccagtgctttgccgttacggacaaatcccggtttcacgacctcaacaggcacttcacggttgcgcacctgtacaatagcggtattgccgatcccctgcgggacgcgggccagcgcgatactgaatcccagtgacggggagaaagttccgctggtgataacgccggtctgtaatttgccgagctcatcagtaaagcggacttccattccggcccgcagtacgcctttttcgcgcatcaccagaccgacctgtttttcagtgccgtcacggcggaatttttccagtgcctcacggccgataaatttccggtcttccggctgccaggcaatagtccagcccatattcgccgccagcggattgacggtttcgtccatctcctggctgtaaagattcatgccagcttcgaggcgtaaggtatcccgcgctcctaacccggcaggtttcaccccggcggccagcagttttttccacaggtcagcagcctgctctgcgggcagcgcgatttcataaccttcctcgccggtgtacccggtagtggcaatgaaataatcgccgctctgcacgccgtaaaacggtttcatcccggcgacggcggctttttgttccgcactcagcagtgtcgcaactttttctttggcatgcggcccctgaacagcaatcatcgccaaatcatcacggactgtcatctcagccgcaaagtttttgcgatgttcgtcaatccacgccagatctttttcacgggtggcggagttcaccaccagccggtaaaaatcatccgcaaagtaatagacgataagatcatcgatcacaccgccggacgcattgagcatcccggtatacagtgctttgcctttttcggtgagttttgccacatcgttggcgagaagataacggaggaactgctgacattgcggaccatgaaagtccacgattgtcatatgggaaacatcgaacataccggcgtcattgcggacattgtggtgctcttcgatctgggagccgtagtgcagcggcatcatccagccgtggaaatccaccatttttgccccgcaggcaacgtgctcaccggacagtggtgtgtgttgtgccattctatcccctttcagtcagacatagtgcgcagcgtgtaccgcgcaaacgatacccttttcctgacgttatcaccgaatcacaaacgtaaccataagaaaaaattgtgaccgtgtacgcggacggaaaaatacgagccgtcagtatgcagatttttcatctgccattctgagccctgaggcgcaaaaaagcattaacaggtgatagttttgaattaagcggcgggaatgcactaaaacaccggccggatcgaccggttaatttttagtgcattatgaataaaactaatgtgaaaaaagcccttaaattagattttttcagctgatgccggcttcggttcacgcagccagtccggcatatcactcagtccgcgggcatggcgcagcagcgccggtttcacgcccggcagtgtgtctgccagcaccagaccgacatcacggaccagttttttcaccggattgctgccgtcgaacagttcacggaaaccctgcattccggccagcatcattgcggcactctgcttgcggcggcgctcaaaacggcgcagccagaaatagttaccgatatctttgccttcagccgtcagacggcggatttcgccaatcagctctgccacatccataaaaccgaggttaacaccctgtccggccagcggatgaatggtgtgagccgcatcgcccagcagcgccagacgcggcgcggcgaactgacgggcataacgtccggtcagcgggattgcccgccgctcactgaccacttcacacagcccgaggcgcagatcaaacgccgctgccagtttatggttaaacgcagcatcatccagatccagacagtgctgtgctgtcagtccgggcagagaccagacaattgagcagtgatgtgcatccggcagcggcagaaatgccagaatgccgtcgccgtggaaaacctgacgcgccacattctcatgcggcagttctgtgcggatggtggcgaccagcgcgtgatgctcataatcccaaaacgaaaccgggatatccgcatgctgacgcagccaggaatttgcaccgtctgccccggccactaagcgggtcgtgagcatgtcgtcattttccagggtgataaaggcatcgttttcgccccacaccacctgacggatttgcgtaccggtgagcagtgttacatcagacagcttttgcacccgctcccagagcgcgttgcggatcacatcgttctcaatgatatgaccaaggtgttcacaatgggcttccgccgcgctgaacgcaatacggccaaagctgtcgttatcccacacttccatgccctgatacggtgccgcgcgttttgccagaatatcctgccagacacccagtcgccccagtaagcgctcactggcactgttgatggcggagacccggacagcaaacggcgcctgcggatcaaaacgggtatccggcgcctgcttttcaatcacggcgatacgcagcccgcagccgtgcagaccacaggccagtgccagcccgaccatgccgccaccggcaattaccacatcatatgactgcattgtttatcctctttccgtggcggtgttaagcggctgcgcgacccagccgagagtctgttttgccagccggttgcgcagaaacggcagcatttccattgccatcagaccggcattccgtccggcggccagcgggaagcaactgttggagaaaaggcgcaccaggctgtcggtcagggtcattgtcgcctgccggtcagcctcacgggcggcatgatattgcatcagcacacggtactgaccaatatcttcctgtgataaaaacgcctgactgataacctccgccagtgccatcacgtcacgcattcccaggttaaaaccctggccggcgatcggatggagtgtctgcgaggcgttacccaccagcgccaggcggtgggaaatctgagagtgcgcggcactcagagtcagcggataacagtgacgggcaccggcagtgacaattttgcccagttgccagccaaaggctttctgcaattcgcggcagaaagtctcatcatcccattcacgcacggcttccgcatgctctgcacggtgacaccagaccagcgaactgcgcccttctgtcatcggcagcatggccagcggcccctgcggggtgaaacgctcaaacgcccgcccctgcggatccaattctgtcatcacattggcaatcaccgccacctgctcatacggggtgtcgctccactgcataccgcattgttgcgcgaccgcagagtgactgccgtccgccgcgatcagaacctgaccgttcagtgttttgccgctgtccagctgaacactgaccgaatccattgtacgggtaatgctttttacgctgtccggacaatacaacgtgacattttcggcttttgccagttcggcaaacagggtttgcccggcatcatacagctcaatcacctgtccgagcgcatcaatatcataatcaccggcggtaatattcacacagccggtatgcccctgatcagacacatgcacccgggtaatcggcgccgcatgcgctttcagggcggaccacagcccgattttctccagccgctgacaggtaccgtatgccagggcaatcgcccgcgcatcaaaccccggatgatggtcatccggtaatctggcttccgccagtgcaacgggaagcctgccgtgactgaggcgggaaagtgccagcgccagtgttgcgccggtcattccgcccccggtgattatcacactcattaattattcagcctgttttgcctgcgccatcagcgcctcaatatcatctgcgtttttgaccactgatgcggtcaggttttcgttgccgtccgctgtgatgacaatatcatcctcgatacggacaccaatgccgcgatatgcttccggcacatccgcatccggcgcaatatacagccccggttcgatggtcagcaccatacccggttccaggatgcggtcacgttctgtgccgtaatggccgacatcatgtacatccagtcctaaccagtggctgagactatgcatgaaaaatgcgcggtatgctttggtctcgatcaaatgcggcacatccccggtcagtaagccgagttttaccagcccttccgtcatgatttccaccacgcgctctgtcacctctgcaatagaagtaccggggcggtagagttcgagggagacatccagggtttccagcaccagatcatagatttcgcgctgctctttgctgaatttgccgttcaccgggaaggtacgggtgatatccccggcataaccctcaatttcacatccggcgtcgatcagcaccaaatcgccgtctttcatccggcattcgttttcggtgtagtgcagaatgcagccgttctcaccgctgccgacaatggtgttataggacgggaaacgcgcgccgttactgacaaatttgtgttcaatttcgccctgtaactggtattcgtacatacccggacggcatttttccatcgcgcgggtgtgtgccagtgcactgactttcccggcacggcgcatgatgtccagctccgccggggatttaaacagacgcatttcgtggacaatcggccgccagtcaataatcgtgcccggcgcggaaaggttacggcggctgccgcggcgcagtgtatcgagggcattaaagacaatggtatcagcatacgccatttcgccctgagcgaaatagagggtgtcgaggccgttaagcaactggcagagctgctcgttgatttcatcaaacggcagtgcgcggtcaatacccagtttttccggcgcagcatcctggccgagacggcggccgaaccagatttccgccgtcagatcacgaacccggttaaacagaacactgtggttatgggtttcatcacttttaatcagtaccagtacggcttccggctcactgaaaccggtcaggtagagaaaatcactgtgctggcggtagggatactcactgtccgcattgcgctgtgccggaggtgccgaaaagaaaaccgccgcgctggccggtgccattttttccagcaatgcctgacggcgtgagataaattcttgtttattcataccctctttccttgtactgtgtgatgattcaggaatctgatggttcagtgtgccgcagattatctgctgcggacagattcagatatatcagtgtaatgtcggtttctgttccggcgcatcagccttttgtgcgctgcgcggcttcgccagcgagatatagcacagctgtaccgcaacgcggacatactcgatcacttcttccagcgcgtcatccaactcttcggcatcttctgcctcatcatagcccagcatgccgatttcccgcagatcagtcacaatttcttttacttccttgcgatcactgaatttcggatccgccacacccagacctaataagaagtgattgacccagccggccagctcatcagcccgggcaaacacacccgcttcatcatccggcagcagtaaattaaactgacattcggtatcatcaagcagttcaaatgtggtattaaagagagcacgcagcggctgtgccagaacctgtgaaaacgccatgccttcgttggtcaggtcgtggatcagtgccagccagctgtcatctgtgttaccgccgcagagcagacccgtgatcaggccgtgcatctctgacgcggtcatggcgacggcctgctgacgcaaaagttcatcaagtgttttaaaatcgggcagtgttttatccggggtcattattttgctcaccagtcgggtttcagttcatgatatgctaccatcaagaggcgccgctgtaccagataagggctgcggcctgctgctataacgtacacaattcacgtcacacaggataatatcctgttgcagaaccaaaggaagatttcatgtctgcacaacccgttgatatccagatattcgggcgttccatgcgcgttaattgtccaccggaacaaagagaagctctgctcgcttctgctgcggagcttgaacaacggttacaggacctgaaagaacgcagccgggtgtccaacacagaacagctcgtttttatcgtcgcgttaaacatctgtcacgaactggcacaagaaaaattgaaaacgcgcgattatgcctataacatggaacagaagataaaactgttacagcagactatcgagcaggcgctgcatgaccaaacccgaatcactgagcgccaggtaacacctattgaataaaattgtttagaaatcagtcactagacaaaaaaaatttcgaaattaggttgcaatatctgcccgatttcatacaatgagtttaagaacaacgttacacgaagttcacaaaattctctgagatgtttgtctgcgggtcagtcccctgagccgatattgatacagacagaatgtggtgatttgtcaccggtgagcatacctgattcgttcaggcagcctaatggaagcaacaccgcgttcaccttgaaccaagggttcaagggttacagcctgcgacggcatcttggagacctctctcttctttatctcctgatatttcgctgatttcactatgactcatgacccgttgttacaagcgcggcatcatctgcgtcagttaatccgcaacaagcgccgtgcgctgacacctcagcagcaaagcactgccgcacaagaccttgttcagcaaatcattcatcaccctgatatacaccgcgccaataatattgccctgtttctctcttttgatggtgagattgatacccgtccgctgacagagtggctgtggtcacagggaaaacaggtctttttacctgttcttcacccgttcagccgccatcatctgttattccttgcttatcgccctgatacaccgctgattaaaaacaagttttcaatttcagaaccggcgttggatgtcacacaggtattaccgccgcaggaactggatatgatgtttattccgctggtcgcgtttgatgaaaaaggagagcgtctcgggatgggcggcggtttttatgaccgcacactgacaggctggcagaagaaagggttttacccggtggggctggcacatgattgtcagcaggttgatgaacttcctgccgcacagtgggatgtcccgctgccggaagtgatcacgccatcacgtcgctggctgtggccggaacataaataaatcagtataaacaatcagataaataatccatctgctgctgacagcgacagcggttaacgggcaaatgaaacgaaaagcatgcgcgtcatggatgacgcgcctgagcgcacacggatgtgtttaccgcgacttttcgtttttgcccgttatccgcagagcaatcaccgctctcagaacaacagacgtgctctgacagttcccggcagcgctttcaactgcagcagaacgtcgtcagcttcatctttgttattcgccacaatgtcgataaccacataacccagatcacccgccgtccgcagatactgcgccgcgatattaataccgcgatcagtaaagacctggttgatgctggtcagcagtcccgggcggttttcgtggatatgcagcagacggttggcattctggccatgcaccggcagtgacacttccgggaagttgaccgcagagagcgtcgagccgttatcggaatatttcgccagcttaccgccgacctcaaacccgatattttcctgtgcttcctgagtggagccgccgatatgcggggtgagaatgacattatcaaacccaatcagctctgaaataaacggatctgccgggtcattgttggccgccggttcagacgggaacacatccactgccgcgccggacaggtgttttgatgccagtgcctgactcagagccgggatatccactactgtgccgcgtgaggcgttaataaaaattgccccaggtttcatcagctcaaactcatgtttaccaatcatatttttggtggattccgtttccggcacatgcaggctgaccacatcactcatattcagcagctcagacagatggcgcacctgagtggcattaccgagcggcagtttgttttcgatatcgtaaaaatagacatccataccgatggattccgccaggatacccagctgtgtcccgatatggccgtaaccgataatccccagctttttaccgcgcgcctcgtagcagcctttcgcctgtttatcccagataccgcgatgcgctttggcattcgcctccggaatacggcgcagcagcagtaataactggcccagcaccatctcagccacggaacgggtgtttgagaatggcgcgttaaagaccggaataccgcgttttgccgctgcatcgagatcaacctggttagtcccgatacagaaacaaccgacggcgaccagtttttccgcacaggcaaaaatctcttccgtcagttgggtacgggatcggataccgataaagcgtgcatcacggatcgcttcttttaattcttccgtggataatgcgcctttatgatattcaatatttgaataacccgctgctttcagactgtctaccgcactctggtgtacgccttccaatagcagaaatttaattttatctttttccagtgatacttttaccatgaccctgccttttgttaagttcccgaaatgtcctgtcctcacatcaaaataacaaaaaataacgtctccgcaatacacgctcctgtacaagtcacagaacaagtcacagggaaaaggcaggtttacaggagaaaatgaaaaaatgccgctgagagctgatattttggccatatcaaagacaaaattgtgatatatatcaccgaaatttatgattttaaaaaaataaaaaaaggaaccgtttccggttccttattcagcatctgaatatgacagatatagtactgatttatttaatggtttttacgccatcctgagtacccatcagcaccacgtcggcaccacggttagcaaataaaccaacggtcaccacaccggcgataccgttgattttattttccagctcaaccggattcaggatttccaggttgtagacatccagaattacgttaccgttatctgttaccacattctgacggtattccggctgaccaccgagtttgaccagctcgcgcgccacataagaacgcgccatcgggatcacttccaccggcagcgggaatttaccgagaatatcaacacgcttgctttcatccacgatacaaatgaatttcttcgcgatagctgccacgattttctcgcgggtcagtgctgcgccaccgcctttgatcatattcatatggtggtcaatttcatccgcgccgtcgacatacacgtccaggctgtccacatcattgcagtccagcacaggaatgccgtagcttttcagtttttcggttgagaccacagagctggataccgcgccgtcaatctggcctttcatggttgccagtgcatcaataaagtgagatgcggtggacccggtgcccacaccgacaatggtgcccggcttcacgaattctaatgctgcccagccaaccgctttttttaattcatcctgagtcatgttattgccttttcgtcgtcatcctatgccaccggcatagcccgcaataattatagcaattatttctcccccggaatgcgaattgtggcatattgtgaatgacttataaaaaagaggagaaaaccgccatgagacgaccggattatcgtgccctgcaggcgctggacgctgttatccgtgaacgtggttttgagcgggctgcacagaaactctgtattacccagtctgccgtttcgcagcgcatcaaacagctggaaaatctgttcgggcagccgctgctggtgcgtaccgtgccgccgcgtccgactgaagaaggccagaagctgctcggcctgctgcatcaggtggaattactcgaagcggaatggctgggggatgatgccgggaatattgagccgccgctgatctctctggcggtcaacgccgacagcctcgcgacctggctgctcccggcactgcgtcatgttctggctgacctgtctatccgtctgaatattcaggtggaagatgaatcgcggactcatgaacgcctgcggcgcggggaagtggtcggtgcggtcagtattcagccgcgtccgctgcccggatgtctggcggatcaacttggcgcgctggattacctctttgtcgcctcaccggaatttgccgcccgttattttcctgacggtgtcagccgcagtgccctgctgaaagccccggctgtggcgtttgattatctcgatgacatgcacatggcctttttgcagaccaattttgacctcgcccccggcagtgtgccgagccacgtactcaattcctcagaagcctttgtgcagctggcaaaacagagctcagcctgttgtatgatcccgcatttgcagattgcggatgaactggagcggggagagttactggatctgacaccggggctgtttcagcgccggatgctgtactggcaccggtttgcaccggaaagtgccaccatgcgccgggtgactgacgccctgctgaaacacgggcgtcagaccttacggcaggagcagcctgaaacggcttaacgtttcagttcaaacacgacatccacctggtcgcggaaatcgatagtctgctgttcataggtttcatccgcagagactgctgccggtgcgccggcggccagcatcattttattacgcgccattaccggaaccggctgtggtgcgttgtaaccgatgctgtaaaccgcacccagctcagtaccaaagccttttgcgaccgatttggcttgtgaaatcgcatcagaaatcgctttctggcgtacttcttcacggtatttctccggattattcaccccgaactcaacggcactgatatcattcagcccgcttttcagcgcaccgtcgagcagtgtgttcagtttgttcaggtcatgcactttcactgtcacagagcgtgaggcgttataaccacggataacggactcttctttctctttgtcatagacataatccggactggtactgatattggccgcattaatgtctttcttttcaattccctgtgctttcaggaaatcaaaatattgcgccacacgtttatctgcctgtgctttggcggctgacgcatctttttcctttactgtcacattgatggacagtgtcgccatatcaggctcagcctggatcacggcgctgccggaggttgaaatatgcgggcctgccggcgtttccgctgcctgagcagctgccgcgtaaccacccagggcaaccatagcggcaagagcaagagatttcagtttcacatatcctccttctgttttaaaccggtcacataacagaatgttatgccggaattagtaacactaccacactctgacgaaacaatatttcggattaataagaaatattcaatccttttaaagctaattgtatcgcgatataccacatcaccgaaccgacaaacagattgataatccgctgtgaaaccggtttttgcagcaccggagagaaccatgccgccagcagcgccaggccgaagaaccacaatattgatgcacagactgccccggcggtgaaccagatccgcatatcagaaccgagttgcccgccgatgctgcccagcaccacaaaggtgtccagataaacatgcggattcagccaggtaacagccaccagcgtcataatcacccgccagcgactgcggaccacctgttcctgcatggtcagcgcggtatcagcggtaaaaactgcccgcagtgccccccagccgtaccacagcaaaaacgccacgccgccccaggtaaccaatgccatcagccacactgactggctcagcagcgcactgccgccgaagaccccggccgtgatcagtaaaacatcactcagcgtgcataaaaatgcactcatcagatggtactgtttacggctcccctgctgtaatacaaatacgttttgcggcccgagcggcagtatcattgctgcgccaagtaataacccctgaaaataagtcgataacatgcaaaaaatcccgataattattcaatccacgccggatggaatgaatattaccgggatttcagtattagtgaaattaataccattaatggaccattactgcggctaataaccacacggaaaaatgctgtcagatccactcccagaccagacgcaccggtgtaccgagacattcactcacacgatggataatttcgtcacgcccgttatccatgcagacaataaaactgttgttataacggactgtcagcccgtaacacgcgaaaccaccggtttcatcgtaatccatctccggaataacgaccggcgccccgcagcagggggtattacgcggtgtcagcgccgcagaaattcgcgcctgtccggtgaccgcaaaaatcgcattcatctgtgcgccccaccagacaccggaaaccggcttacggcagacagggcaaagcggataacggaaattttcactgccggaccagaacataacgtccggatccgcctgatgcataatatcgtcagccgccatccactcactcagatactgctccgcagcctgttgctgctcagcatccgggatataactcagtgtctcaggaataaaatgaagtaaatgctcgctcatcataatctctcacagtacggcaaaaaaaagcggcacccgaaaggggcaccgctgataatatacacctgttatgcctgtgtttgctgactattctgatgcatatgcacatcaagctgcgggaacggaatgccgatattatgcttatcgagtgcgcgcttgaagttttccagcagatcccagtatacatccatgaaatcgccgttttttgtccagtagcggacaacgaaattcagagaagacggcgccatttcattgagacgcaccacgatgcctttctctttctggacacgcgggtcagccgcgacgatctctgtcagaatctctttgacctgatcaatatccgcgttgtaggccacaccgacaataatgtcacggcggcgatctggttcacgggtcacgttaataatatcacccgcaatcactttaccgttcgggatcacaatgattttgtcatccgcgctgcgcagtgtggtggaaaaaatctgcacattctgaaccgtcccttctgacgcaccgataaccacatattctccggcacggataggacggaaaaccaccagcaacacgccagccgcgaggttagagagtgacccctgcaatgccagaccaacggccagacctgccgcaccgagcaccgcgatcacagatgcggtttgtacgccgagacgtcccagcaccgcaatcagtgtgaaggcaataaccgcatagcgaaccatcgcggacagaaaatcagagacagtgacatccacgccgcgcattgccagcaggcgggaaaccgctttagcagccatttttgccacaaacagaccaataatcagggtcagtacggcagccacaatattcactgcataatccagcagcaatgcctgattatttgccagccatccggttgcctgattcagaccgtccgtcaggatttgttcattcattcatccacctcataagttaccggaaataaagaaaaacaacattgttgcaataaccgaccgattatcgccccgggtaaagaacctctggtttatattaccgtaacaaatgaaaatttcagaataaaaattctcatccctgcccgccggtcacaataaatttacgatagttttccagtaaaatcataaagtcagctgtgccgcagaatgcaatactttcattatcgtaataactcatgccttcgtccggctcatctgtttcaaaggtaatctgattcgcgttaatcatgatttcctcatcatccatcagcaaagtgtattcatgccccacacgctgccactgctgttcccgccctttaatactgtcaaatgccacggttatctcatcaatcaccgagagatcccctttcacttcttcattcagccagtgaccgatcgcttcgtgatccattgacagcttaactatcacgttcccgtcgatcccgagggaaaattcataatccatcgctgtatacctcttgttaatgctttaccgctgtcacgtatgcaacacctgctcttattttagcgggttatcccgtttccaggtacattgataccgtaattaaccggataacaggtataaaaaacgggagacagtggttgctgtctcccgccggtaataaaactgcggactgattcagatgctgactatcacacctgagtctggaaaatcacgccatccgcgactttggtatactcattcagctggtcaaagttgaggtaacggtaggtatcttccgccgtctcatccactttatccataaaggtctgatactccgccggtgtcggtaaacgccccagcagggaagccaccgccgccagttccgcagaggccaggtacacatcggcaccggtacccagacggttcgggaagttacgggtggaggtggaaacgaccgttgagttatccgccacacgcgcctggttccccatgcacagtgaacagcccgggatctcaacacgggcaccgctcttaccgaagatgctgtaatagccctcttctgtcagctgagcggcatccatcttggtcggcggtgccacccacaggcgggtcggcagctggcctttatgactgtcaagcagtttacccgccgcgcggaagtgtccgatgttggtcatgcaggagccgataaagacctcatcaattttactgcctgccacgtcagacagcagacgagcatcatccggatcattcggcgcgcagagaatcggctctttgatgtcattgaggtcgatttcgatcaccgctgcgtaatccgcatccgcatcaccttccagcaactgcggatccgccagccatttttccatgctctgaatacggcgctcaatagtacggcggtcgccgtaaccttccgcaatcatccacttcagcaggacgatattggaattgaggtattcggtgatcggcgctttatccagtttgatggtacaacccgccgcagaacgctcggcagaggcatctgccagctcaaacgcctgttccactttcagtgtcggcagaccttcaatttccaggatacggccggagaaaatgtttttcttcccttttttctccaccgtcagcaggccctgctgaatagcgtaatacgggatagcatgcaccaggtcacgcagtgtgatccccggctgcattttccctttaaagcgcaccagcacagattccggcatatccagcggcatcacgccggtcgccgctgcgaaggcaaccagaccggaaccggccgggaaggaaatcccgatagggaaacgggtgtgagagtcaccaccggtaccgacggtatccggcagcagcatacggttcagccaggagtggatgataccgtcccccggacgcagagacacaccgccacggttcataatgaaatcaggcagagtgtggtgagtatttacatccaccggcttcggatacgcggctgtgtggcagaaagactgcatcaccagatccgctgagaaaccaagacacgccaggtctttcagttcatcacgggtcatcggcccggtggtgtcctgagagccgacagaggtcatcttaggctcgcagtactcgcccggacgaacacctgccacgccgcaggcacgaccgaccatcttctgtgccagcgagaaaccgcggctgcttttctcaaccggtttcgcctgacggaaaatatccgtatgcggcagaccgagagactcgcgggctttggcggtcaggccacggccgataatcagcgggatacggccaccggcgcggacttcatccagcagcacatcggttttcagttcaaatgtcgccagcagttcattggtgtcatgattgcggatctcacctttatacgggtaaacgtcgatcacatcccccatattcaggttgctgacatccacttccaccggcagcgcgcccgcgtcttccatcgtgttgaagaaaatcggggcaattttaccgcccagcacgataccgccgccgcgtttgttcggcacatacgggatatcatcccccataaaccacagcacggagttggtcgcggatttacgggaagagccggtaccgaccacatcaccgacataggccagcgggaacccttttttgctgagcagatcaatctgattaaccggaccgatattgcccggctcatccggatcaataccgtcacgcgggtttttcagcatcgcgagtgcatgcagcgggatatccggacgcgaccaggcatcaggtgccggtgacagatcatcggtattggtttcaccggagactttaaagacggtgacggtcagtttttccgccagctgcggacgctccaggaaccagtctgcatcagcccaggactgaataattttctgtgcatacggattaccggctttcgccttttcttccacatcatagaaattatcgaacatcagtaaggtatgagagagcgctttggcggccacaggggccagtttttcgttatcgagggattcaatcagggcgtgaatattataaccaccctgcatggttccgagtaattcaacggctttttcagcggagatcagcggtgaatgtgcttcaccttttgccagagcggccagaaaaccggctttcacatacgcggcttcatcaacacccggcggtacacggttggtaatcagatcaacaagaaacgcttcttcgcctgccggcggagatttcagtaattcgactaactcagcaacctgagcggcttccaatggcttaggggcgatcccttgtgctgcacgttcggcaacgtgcctgcggtaattttccagcacgacgtactccttgctttgtgttttttatgagtgcccggcaacggggtttcagcatatcaaaatttaaacacattgttaattcattcacattaaagcaacataaacaatttgtgagctgaataacattagtgaattaaacttgctgcttacccgtttcaccagtgttatgccgttttaaacaggaatctgcacgattattgattacgccggaaatgcaaaaaacggtcgtttgcgtagttctgctgcaccgggaacggcggtcagcacgctgaaattattaatatctgaataataccggtttgtctatgaatacacaggcgggtgctgacagcagggaataaaaaaaatccggcgccagaggcaaccggatttttatcttcagccgggtaacaacgtggttaccgggtcagctgattactttttctttttcgctttcggattcggaaggtcagtgatgctgccttcgtaaatctcagccgccataccgattgattcgtacagcgtcgggtgagcgtggatggtcagtgccagatcttccgcatcacaacccatttcgatagccaggccgatttcacctaacagctcgccgccgttagtaccgacaatcgcaccaccgataacacggtgagattctttgtcgaaaatcagtttggtcataccttcagcgcagtcagacgcgattgcacggccggaagctgcccacgggaaggttgctgtttcgtagctgatgcccttctctttcgcttctttctcggtcagaccaacccatgccacttccggttcggtataggcaatagatgggatcactttcggatcgaagtagtgtttcagaccggagataacttcggctgccacgtgaccttcgtgaacacctttgtgcgccagcatcggctgaccgacgatatcgccgatagcaaagatgtgcggcacgttggtgcgcatttgtttgtcaacgtgaatgaaaccgcgatcgtcaacttcaacaccggctttatcagccgccagcagtttaccgttaggggtacggccgatagccaccagaaccgcgtcgtaacgctgtggttctgcagggcctttcttgccttccattgtgacatagataccatcttctttggcttcaacggcagtcactttggtttccagcatcaggttaaacttggagctgatacgtttggtgaacagtttaacgatatctttgtctgccgcaggaatgacctggtcaaacatttcaacaacatcaatctgtgaacccagcgcgtggtatacggtacccatttccagaccgatgataccaccacccatgaccagcagacggcccgggacggttttcagctgcagtgcatcagttgaatcccagacacgcggatcttcgtgcgggataaacggcagctggatcgggcgtgagcccgcagcaataatcgcgttgtcaaacgtgatggtggttttacccttctcaccgttgacttcgatagtatttgcgccggtgaactggccgagaccattcacaacagtcactttacggcctttcgccataccggccagaccgccggttaactgagaaataactttctctttccacagacggactttatcaatatcggtctgcggttcgccgaacacgatgccgtgagaagccagcgctttcgcttcttcgatcactttagcaacatgcagtaatgctttagacgggatacaacctacgttcaggcagacaccgcctaaggttgaataacgttcaatcaggacagtttccagacctaagtcagcacagcggaaagccgctgaataccctgcagggcccgcaccaagtacaacgacctgggctttaatttcagtactcatcgtgacctcttaattgtttgtccggcgggtcagacgacatatattccaccgggacgtacacactgagagcagtttacaaaattgttaacaacctggaaaggcgcagttctgtgacctgactcccgttatccgggatgagcacgtttcagcctgcgccactgagaccggctctgcaccggtctcagtgtaattgcttacatcgccaggcggcgtaaatcgctcatgtactgattaatcagcgtgatgaagcgggcgccgtcagcaccatcgatcacacggtggtcgaaggagagtgacattggcagaatgagacgcggaacaaactgtttgccgtcccataccggtttcatggatgaacgtgacagacccatgatagccacttccggtgcgttaacaatcggagcgaaaccggttgtcccgataccgcccaggctggagatggtgaaacatccgccctgcatatcagaagaagtcagcttaccgttacgggcttttttggagatttcagccagttcgtaagacagttccagaataccttttttgttcacgtctttaatgacaggaacaaccaggccgttcggggtgtctaccgcgataccgatattgacatattttttcagaatcagacgctgtgcatcttcggtgatagaactgttgaaacgcggcatttcgaccagcgctttggcagcagctttcatcacgaagaccagcggagtgattttcacgcccagctgtttcttctcagcttctttgttctgctgtttgcggaattcttcaacatcagtgatatccgcttcgtccatcagcgtaacgtgcgggatcatcacccagttacggctcaggttagcaccggacagtttctgaatacggctcagttcaacttcttccacttcaccgaacttgctgaagtccactttcggccatggcagcatgccaggtaaaccgccgcctgctgcagccggagctgcttcagcgcgtttcaccgcatctttcacataagcctgaacgtcttcgcgcaggatacggcctttacggcctgtgcctttgactttcgccaggttcacaccgaattcacgggccagacggcggataaccgggcttgcgtgaacgtaagcatcgttctcaacgaagtcattacccgcagccggagctgctgccggagcggctttcgctgccggtgcagacgccggtgctgcggccgcaggtgcggcggcggctggctgtgctgccggagcaggtgctgcacccgctacttcgaataccatgatcagagagccggttttgactttatcgccaacggctactttgatttctttaactttaccggccatcggagacgggacttccattgaggctttgtcgccttcaacggtgatcagagactgttcttcagtcacggtatcgccgacgctgaccatgatttcagtcacgtcaacttcatcaccgccgatatccggtacatggatttctttgtctgctgccacggcaggtgccgctgctgcaggagccggagcggctgcggcaggctgtgccgccggtgctgcgcccgcaacttcaaagaccatgatcagggaaccggtgctgactttatcgccgacagcaactttgatctctttaaccacgcccgccatcggagacggaacttccattgacgctttgtcgccttcaacggtgatcagagactgttcttcagtcacggtatcgccgacgctgaccatgatttcagtcacgtcaacttcgtcaccgccgatatccggcacatgaacttctttcagtgcggatgcggcagccgccgccggagcagccggtgcggcagcctgagctgccggagcaggagccgctgctgcggcctctgcttcaaataccatgatgaaagagccggtgctgactttgtcgcccacagccactttaatttctttaacaacccctgcctgcggagacggaacttccatcgacgccttgtcaccttcaacggtgatgagtgattgttctgcttctactttatcgccgacactgaccagaatttctgttacatcaacttcatctgaaccgatatcgggcacatggatttcaatagacattaatttttacctcttatgccacacgcgggttaactttttcagggttgatgctgaatttcttaatggcttcttcaaccactttcacgtcaacttcaccacgtttagccagctcacccagagcagcaacaacaacgtaaccggcatcgatttcgaaatgatgacgcaggttatcacggctgtctgaacggccgtaaccgtcagtacccagtacacggtactggtcagcaggaacataaccgcgaacctgttctgcgaacagtttcatccagtcagtggacgccacagcaggtgcatcgttcatcacctgagtgatgtaaggcacgcgcggggtttctgacggatgcagcatgttccagcggtcacaatcctgaccttcacgggccagttcggtgaacgaggttacgctgtagatatcagagctgataccgtactcagaagacagaatctgacctgcttcacgcacgtgacgcagaatcgcacctgaacccagtaactgtaccttgcctttatcaccggtcagggtttcgagcttgtagatacctttacggataccttcctcaacaccttccggcattgcaggcatgtggtagttttcgttcagcgtggtgatgtagtagtaaatgttttcctgcgcttcaccatacatacgctccagaccatcctgcatgatgaccgcaacttcgtacgcgaatgacgggtcataagacaggcagttagggatagtcagagactgaatgtggctgtggccgtcttcgtgctgcagaccttcaccgttcagggtggtacggccggaagtaccgccgatcaggaagccgcgtgcctgctgatcgcctgccatccacatcaggtcaccgatacgctggaaaccgaacattgagtagtagatgtagaacggaatcatcggcaggttgttggtgctgtaagaagtcgcagctgccagccaggatgcgcctgcacccagttcgttgataccttcctgcaggatctgacctttcacatcttcacggtagtaagcaacctgttcacggtcctgcggggtatacagctgacctttggagttgtagataccgatctgacggaacagaccttccataccgaatgtacgcgcttcatcagcaatgattggcacgatgcgttctttgatggatttgtttttcagcatcacgttcagtgcacgcacaaacgcgatagtggtggagatttctttgctctgctcttccagtaactggctgaaatcgctcagtgcaggaatatccagtttctcatcgaaatgagaacggcgtgaaggaaccggaccatgcagtgccgcacggcgttccatcatgtatttctgctcttcagagttttcgtcaaacttgatgaacggcagtttttccagctgatcatcagccacatcgatattgaaacgatcacggagatggcgcacgccttccatgttcattttcttaacctggtgagcgatgtttttaccttcagcggtatcacccataccataacctttaacggtctgggccaggatcagagttggtttacctttggtgtcatgcgcttttttcagtgcagcgaacattttcttcggatcgtgaccaccgcggttcagtgcgaagatctgctcatcagtccagtctttgactaatgcagcagtttccggatagcggttgaagaagtgttcacggacgtaagcaccgtctttggatttgaatgtctgatagtcgccatcaacggtttcgttcatcagctggatcagtttaccgctggtatctttcttcagcagttcatcccagcggccgccccacatgactttgattacctgccagccggcacctgcgaacataccttccatttcgttaacgattttaccgttaccgtttacagggccgtcaagacgctgcaggttacagttgataacgaagatcaggttgtccaggctttcgcggacagcgatattgattgcacctttagattccggctcatccatctcgccatcacccaggaaggcataaacggtttgctcagaagtgtctttcagaccacggtgttccagatatttcaggaacttagcctgatagatagctgccagcggccccagacccatagaaacggtcgggaactgccagaagttaggcatcagtttagggtgcggataagaaggcagacctttgccgccgatttcctgacggaaattgttcagctgctcttcggtcagacgaccttccatgaatgcgcgtgcgtagtagcccgggcttaagtggccctggaaataaataacatcaccgccgtctttttcgttctgcgcacggaagaagtggttgaagcacacttcatacatggtagccgcagactggtaagatgccatgtgaccgcccagatccagatctttcttggatgcgcgcaggaccatcatgacagcgttccagcggatagcagaacggatacgacgttccagctccaggttgcccgggtaggcaggttcatcctcaacaggaatggtgttgatgtagttacgggccgcagcacctgctgcaacactcacaccaccctgacgggcagtattcagaacctgatcaatcaggaactgtgcacgctcaacaccttcttcacggatgaccgattcgatcgcctgtagccagtcgcgggtttcgatcggatccacgtcattgttcaaaatgtctgacatggtgtattccttatagtttatctgtttctaatgatattcggagcctatcttcacgtatcccgctttaacggtgacgggcgacgtgaagataggcccggctatatattgccgctgatgcataggtcagcttacagacgcagcattcagggatctgtaagccccaaaaccattactgatttattctgtatactgctggagacggcgcagtgaacgttcccggcgggtgtgttcacggctcatatccagcaatacgtcttccaggaatgccagatggcggtgggatgcttcccgcgcaacctccggcgaccggctcataatggcccggaatacctgttcccggtgctcgctgaccatcgccagcatctctttccgggtatataagaattcaaagttctgccggatatttttttccagcatcggcaccatacagcgcagcagatgtaacagcaccacattatgtgcggcttctgtgacaatcagctgatattgcaggacagcctgagattcggcttccacatccccggcgtcgcgggcatcggcaatcgcctgatggctgttggtgatacggacaaaatccgcttcggttccccgcagtgcggcataataggcagcaataccctcgagggcatgacgggtttccagcagatcaaactgagattcgggatgcccttccagcagctgggccagcgggtcactgaagctttgccagagattgctctgtacaaatgtgccgccaccttgtctgcgcagcagaaagcctttcgcttcaagtttttgaattgcttcgcgcagtgagggacgtgagacgtcgaactgtttggccagctcgcgttcaggcggcagcttctcccccgggctcagagtgccgtcgaggattaagtgttccagccgctgctcgatcacgtcggctaattttggttggcggattttgctgtaagccatatttgcatcagaaccatcaacatggataaatattgcttcatgggttttgtagtcaattggtaataccaatttcttttacagggtcttaaagtaacaaagtattcaccaactgtctataaagaccttgagctaaatcataaaaaccagcaagttttaacaattttttttaaattttagcataaattgataactgatacgtttaaatgctgcatcgtgaatgttacagaatttaacgtttaaaattcagataaatacgcaaactgaaccgttacagtgactagatcgacggataaataatcactttttgtgcattttcaccgcatcttattgatgattttccgcttcacagagcccggccagattgtttccgctgtaacgatactcaccagacgcatttaatcagtaacaggttaccggaatgctaattctagcagggaaccggtaaacaggaaaatttcacgtcagtcatatctgcgaaattttactgatcattcagccggaacgtctgccggattcagtgaattcctgtatcggttccagtcgaaacagggaccgggatccgttttgcgccccggcgcaatatcactgtgtccggtgatatgcccttttatttgcggatagtgtgccagaagcacctgtgtcaccgcagtcagtgcgcggtactgttcatccgtaaaaggtcgggtatccgtgccttccagctcaataccgacggaaaaatcattacacttttctgtgccctgataacaggaaacccccgcatgccaggcccgtgcatcaaaaggcacatactgcacaatttccccggtccggcggatcaggcaatgtgcggaaacccgcagtgccctgagagatcccctcataatttccccaaagcgtaaccatgtgtgaataaattttgagctagtagggttgcagccacgagtaagtcttcccttgttattgtgtagccagaatgccgcaaaacttccatgcctaagcgaactgttgagagtacgtttcgatttctgactgtgttagcctggaagtgcttgtcccaaccttgtttctgagcatgaacgcccgcaagccaacatgttagttgaagcatcagggcgattagcagcatgatatcaaaacgctctgagctgctcgttcggctatggcgtaggcctagtccgtaggcaggacttttcaagtctcggaaggtttcttcaatctgcattcgcttcgaatagatattaacaagttgtttgggtgttcgaatttcaacaggtaagttagttgctagaacccatggctcctttgccgacgctgagtagattttaggtgacgggtggtgacaatgagtccgtgtcgagcgctgattttttcggcctttagagcgagatttatacaatagaatttggcatgagattggattgcttttagtcagcctcttatagcctaaagtctttgagtgactagatgacatatcatgtaagttgctgataggtttccagttttccgctcctaggtctgcatattgtacttttcctcttactcgacttaaccagtaccaacccagcttctcaacggatttataccatggcactttaaagccagcatcactgacaatgagcggtgtggtgttactcggtagaatgctcgcaaggtcggctagaaattggtcatgagctttctttgaacattgctctgaaagcgggaacgctttctcataaagagtaacagaacgaccgtgtagtgcgactgaagctcgcaataccataagtcgtttttgctcacgaatatcagaccagtcaacaagtacaatgggcatcgtattgcccgaacagataaagctagcatgccaacggtatacagcgagtcgctctttgtggaggtgacgattacctaacaatcggtcgattcgtttgatgttatgttttgttctcgctttggttggcaggttacggccaagttcggtaagagtgagagttttacagtcaagtaatgcgtggcaagccaacgttaagctgttgagtcgttttaagtgtaattcggggcagaattggtaaagagagtcgtgtaaaatatcgagttcgcacatcttgttgtctgattattgatttttcgcgaaaccatttgatcatatgacaagatgtgtatccaccttaacttaatgatttttaccaaaatcattaggggattcatcagcgcagtgcctgtatttccgcaaaaaaaggatgcgcatccgggtccagcgtgccctgaaaaagctggtcaatatacggaccaccgaactgtcccggcggcagactgatattgtggatcaccagtaaacggggagtcacctgttccggccgggtatcgtgatgcggtgaaatcacccggcgcgctgtggtcagccagccatcctgaatatccattcgttctcctgagcaaaaaaccgttattcaatcacataataaatatcattttgtgccgcacagtatacgtgtcttcccccctttccggggagtactgatttttcacgacagatttttgcgtgtcagaccgaaaaaaaatctgcatttctcaaatgttacaccgcagttttccatctgtaccgagaaatccggagacctctcttttttgccgatccgtcattgaataaagtgcatcacgctaaataagtacctctttcacagacacaaaaaggagcatctgtatgaaccagcgcggattcacattaatcgaggtgatggtggtggttgccattgtggccgttctcagtgccatcgcggccggctatcagaactatatccggaaggcagcactgattgacgtgctgcgcacggttaccgcgtttaaaaccagcgtggaactgtgcagttttgataatccctcttttgcaggatgcaacagcgggtcgggcaccattccggctgatactccggggcgctacatcaaatccgtcaaagcggaaaacggtgttgtgacggtacagggaaacagttcactggctgcgctgacggtcagcactaccccggtaagaaatccgcttaacggtatcacggtctggacaaccgactgtaacagcgaagaagacgcactgaaaaaaatctgtcttgacgtcatcaagtaactactgacatgaaaaggaattcattatgcaaacagctgcacccgcccctgtcacccgtaccggcggggaagaacaactcttactggctgaagttcatgcactttgtgagcgcaatgaactgatgctgattgactataaccccgatgccgtcagagttgctgccgcacagcagccgcgcagagatattgtgtctgctatccggtttctggccggtaagcgggtggacattgaattgtggcacagtgaaaaactggcctactgccgccgcaataccccgctgccggagccggtccttttccccggtgtaacaccggagacaaacacgcaggtctcggcggataccggcaataactgtacaggtaccggttcaccactgccgccgcctgccccgcctccggcgcaggatccccgccgggcgccggagacagatacctggccggcagaacagcaatccgccgctgtccggtttgttaaccagatgattgcgggagccattgccaagcgggcctccgatattcacattgagccagcacaacagggttaccggatccgtgccagaatcgacgggcaactgcatacgctgaattcaccgccaccagaaatcagtagtgagataattatccgcatcaaaatcatttccggcctcgatattgccgaaaaacggttacctcaggacgggcagtttgagtggctggaaaataacacccgctatgctgtccgtgttgccacactgccgacaatttatggtgaaaaagtcgtactgcgcctgctgagcaccacgcagaatctggcgctggaaaaatccgggctgacggcccggcaactggaaacgctgcatacaggtctgggcagtgccaccggtattattttgctcaccggtcccaccggcagcggaaaaactgccacactctacggctgcctgcagtacctgaatcagaataaccggaatatctgcagtgttgaggatccggtggaaatcccgctgcgggggatcacccagacgcagataaaccccaaaattgagctgggcttcgccgccatcctgcgggccctgctgcgccaggatccggatgtcattatggtgggggaaatccgggataaacccaccgccgagatggcaatcaaagcagctcataccggtcacctggtgctgtccactctgcatacaaactctgcggaggatacatattcacgactgaggcaactgggtattgatgaatatttcatgaaaacctgcatcaaactgatcattgcacagcgtctggtccgcctgttgtgtccgcgctgtaaaacgcagaaacagaaaacagaaaccgtgatactgagcagcggaaaaacacatcaactcaccccgtggcaggcaaacggttgtgatcactgcttttcaggctattacgggcgtaccgcctgctttgcatttctcactccgcaacacacaatgtcttcttctgccggtgaattacccggttcactgtttgatgccggtatcgcgctggcggaatcaggggtaaccacactcaatgagatttaccatatgcaggatatttaacatccgctgaccaacaggagtgatgccatgcaaatttaccggctgtatgactggtccggtctgacacccgctgacaaggtggtgaccggaacgcttatctcaccttcagagaataatgctgtcagtcagctgatttcgcagagcatcacacctgtatcactgttttgccgcaaacggctggtctgctcacaaaaagaaaaacagtatctgctgcactttacccggcagctggcaacattactgacgtcggggttaccgttactgaaagcgctcacactactggcaggtgaatgcagtcacccgctctggaaagaagtagtccgtgctcttatcagacaacttcagcagggaaaaacatttactcagggaataatgcagtaccccggtttatttgattccttttattgtcagatggccacagtcggggaggaaaccggcaaattacctgagtgtcttcacacgattgcacagcatattcagagtaactgggatcaccgggctgcattaattaaatcaatccgctatcccgttgcattgttagttgtctgctctttgatgatcacattaatgtttctgtttgttatccctgaatttgcaaaaatatatacctcattcggtgcggagcttccggctctgacacaatggttgatccgggtttctggtgttattaccggttacacaatcccggcaatgggtataatgactgcaattatatttatttatcatgtatttcggcgaagacatccggatataaaaaaaacagaatcaacctgtattctgcgtattccgtttatcggaaacattattatcttcagctgtgtctctcatattttccggatactggcaataacacaacaatcaggcattacacttatttcgggtattaatacacttattatgacaacaacacatccgttatataaagaggcattaactgtgatacgggaggacttgcttcacgggaaaacattcagtgaatcaattaaacaatccgggttattcccatctctgtgtcatgagctgattgccaccggtgaagccaccgggaaattcggacacttttttctctataccgcagactggtttaaatctctcgccttaaaccaaattcagacattttttaaaatactccagccggtactgtttatcctgctggcaattcttgttgctgttttattaattgcaatgtatttacctttattccggctcggtgaagttttagtctgataaaactatttataatttaaagaaacagattaaaaaaattcaaacctgtgaaatatctctgtattcatcgcttatttgccataggcgaaattaatttcatcaggtacaatttacccgttgtttcgatcaggacagaaatacaatggcttatattgttgcgttaaccggaggtatcggcagcggaaaaagtaccgttgcggatatgtttgcccgtctcggggtccctgtgacagatgcggatattattgcccgtcaggtggttgaaccgggaacgcccgcattgcaggctattgccgatcacttcggtacccggattctggctgcagacggcacactggacagagcagcactgcgccgggagatctttgcagaccccgcggaaaaaacctggctcaatcagttactgcatccgcttatccatcaggaaacccggcgccagctgaacaatatcactgccccttatgccctttgggtggttcctcttctggttgaaaataaccttgcttcccttgcggatcgcgtgctggttgtggatgttcatccgcacgaacaagtcgcccggacaatgcgccgtgacggcgtttccgctgagcatgccgaaaatattctgcgggcgcaggcatcccgtgaacaacgtctggccgttgccgatgatatcctgacaaatcatgataacgatgagccgctgatgccccgcgtccttgcactgcacgaactttatacagcattggcccgtcagccaaaacaggaacacccatgagcgaaatccgtcagtctgttatttttgaacaccctttaaacgaacgaacccgttcatggctgcgcattgaaacatcacttcagcaaatgagtacactctccccgctggactctctgccgtccagcctggcattcttccgggccgtcgcggaatttattgaagtgattgatcgcggtgaagtccgttcggaaattttaaaagagctggaaaagcagcaaaaaaaactggccatgtgggcagaagcccccaatgctgaccaggcactgatccgggggttttctgacgaactgaaacaaaaggccgctgaactgagcaaagcgccccgcatcgcccagcacctgaaagaagataaaataatcggtattgtccgtcagcggctgagtatcccgggcggatgctgcgggtttgatctgccctaccttcatctgtggctgaatctgccgcagagtgtccgtgataccacacaggccgcctggattgaaggcttgcagccgctgcaaaatgcactcggcagcctgctgaccctgctgcgtcagtccgcaccatttgttgcggctgaaagccacaacggtttttatcaggataacgcggaaggggcggatttactgcgcctgcgtctgccggttgatttccagatttacccgcaggtctccggccataaaacacgttttgccatacgcttcctgcatactgacagcgaacacggtataataccggctactttaccgtttgaaattgcctgttgctgacagggaggatgttatgtcagaagctattatcgttaactgcccgaattgcaaaaaagaagttgtctggggaccggaaagtccgtaccgcccgttttgcagtaaacgttgtcagttgattgatctcggggagtgggctgcggaagaaaaacggattgccagccagagtgacctttctgacagtgaagcctggagtgaaccggaagacagttcaccgtactgattaatccggcagcggctgaattaaaacagccgccgccgtacctctgaatcttattctgtcagcaatgccacaattccccggttaaccggcgggaactcctcagcaatcagtgctgtttgttttacccagcgggatggctgaccttcgcgaccatatggcgcattctgccactcttccaccaggaagaaataaatggtgatcaggcgatccggaaattcatgttctgccgtctgcaatagtttaccgggaaccgcaacaatacccagctcttcttccagctcccgtaccagcgcctgctccggtgactctccggattccagcttaccgccgggaaactcccagtaaccgcccatatgagatttcagcggacgctgagcaataaatatctcaccttctgcattacggataacgccggcagcaatatgtaagtgttttttttccatcatgttctgtccgttttatttacagaagaaaggcgggttcccccgcctttttatgctaatcgtctgtcaggactgattatttcagtgcaccgtggcactgcttgtatttcttaccggaaccgcaagggcacggatcgttacggccgactttgcggacaccggatgccatttccgcttcagttttagtcatcagcgcggcattgtcattttcatggctgagctgctggcgctgtgccagacgttcagcttcctcacgacgacgctgctccagtgcttccacttcttccggcatgcggacctgaactttggaaatggtgctgaccacttcatatttcagaccttccagcatgttagcaaacatggagaaagattcacgcttgtattcctgcttcggatctttctgtgcataaccgcgcagatggatcccctgacgcagataatccattgctgccaggtgctctttccacagggtatccagggtttgcagcatcacgcctttctcgaagtgacgcatcatttcagcaccgacaatctcttctttggctttgtaaacttctactgctttatcaagaatgcgctcacgcagggtttcttcgtgcagttcaggctctttatccagccactctttgattggcagatgtaagtcgaaatcctgttccagacgtttttccagccccgggatatcccacatttcttccagagattgcggcggaatatgtgcatcgataacggttgtgaatacatcaccacggatgctgtcgatagtttcgctgatatccccgttatccagcaggtcattacgctgggtatagatagcgcggcgctggtcgttagccacatcatcgtattccagcagctgtttacggatatcaaagttgcggctttccactttacgctgtgcgttggcaatcgctttggttacccacggatgctcaatcgcctcaccttctttcatacccagtttgcgcatcatgccggtaacacggtcagaggcgaaaatacgcatcagcgcatcttccatagacaggtagaagcgggaagaaccggcatcaccctgacggcctgaacgaccgcgtaactggttatcgatacggcgggattcatggcgctcagtaccgataatatgcaggccgcctgctgccagaacggcatcgtggcgctcctgccatgcagcttttgccgcagcgatattctcttctgtcggctcgtccagcgccgccagatccgcctgtaagctgccgcccagcacgatatccgtaccacgacccgccatgttggtggcgatagtcacgtgaccggaacgacccgcctgttcaacgatatccgcttccatggcgtggaatttggcgttcagtacgctgtgttcaattttggcttttttcagtgcgttggagataagctctgatttctcgatagagatagtacccaccagtaccggttgtccggctgcggtacgctcacggatatcttcaatgatggcattgaatttatcagcttctgtcatataaaccagatccggcaaatctttacggatcatcggacggttagtcgggataacaatggtatcgagtttataaattgaactgaattcaaaggcttccgtgtccgctgtaccggtcatcccggccagtttggtgtataaacggaagtagttctggaaagtgatggaagccagtgtctggttttcattctggatttccacaccttctttggcttccactgcctgatgcagaccatcagaccagcggcggccctgcatggtacggccggtgtgctcatcgacgatgataacctcaccttcgctgacgatatagtcgacatcacggacaaacagggagtgcgcacgcagacccgccataacgtggtgcatcagcatgatattggatggtgagtacagtgattcaccttcattcatcagacccgcttcagacagcagctcttccaccagcaccagaccacgctcggtcagtgtgacctggcgggttttctcgtccacagagaagtgaccttcacctttgaaagtgtcggaatcttctttttcctggcggaccagacgcgggatcagtttatccactttcatgtacagctcagagctgtcttctgccggaccggagataatcagcggggtacgggcttcatcgattaagatggagtcaacctcatccaccagcgcgtagtgcagtttgcgctgtacacgctcttccgggctgaacgccatgttgtcacgcagatagtcaaaaccgtattcgttgttggtaccgtaagtgatatccgcagcgtacgcttcgcgtttggccggtgcaggcatgcccggcaggttgataccgacggtcataccgaggaattcaaacagcggacggttgttttcggcgtcacgctgggcgaggtagtcgttcactgtcaccacgtgaacccctttgccggacaaggcgttgaggtaagcaggcagtgttgcggtcagcgttttaccttcacctgtacgcatctcagcgatgcagcgttcgttcagcaccatgccgccgatcagctggacatcaaagtgacgcataccaaatacacgtttactggcttcacgtaccgtggcgaacgcttccggtaagatatcctgctcggattcacctttggccaggcgatcacggaattcctgtgttttggcttttaattcatcatcactgagtttttcgaactcaggttccatccggttgatagcttccacggatttgcgcaggcggcgtaaagtacggtcattccggctgccgaagattttggtcagtaattttaccagcataataaacgtctctgttcaggcacaatcaggccttgttaataatcaatgtgttaataatttttttgaggaactacgctgattgtacgggaccggcacggatgccgccggtgcgggcaatccactgaaccgaaaaagacggagacgggttaactacagcaatacgctgcggcagaactgccggatgataaacaggcagagccggggagtcggtcagaatggcatacagtgccgccagcatattttgtgcggaggcatcatgccggtcttctgccggggtattatcttttgaggcatcttccggacaggaaaatgcaaaggaaatctggcggataacattacggacagcatgctgctgccagtaattaacgttctgtgaggttctcgccggctggctgctttgcaggaacaggctgtcaaaggcggataatgcctgactctggcggttttgtgttgtcccggtaccggctgtggtaacatcaccactgttcagtaccgcaggcaggccaaaaccggtcgccacaatcccgataaagagatggcaccagaaataacgcctgccaaattgccgccaaagatttaaaatagtgtttccctcacgagatccggagtatatgtgatgcgcgacagtcagccagtttcccttgaaagcctgctggaaagcgggactaaggataataatacccttaaaagtattcagcagcgtgctgtcgtgttacttaaactcaaccgcgccgttctggcgctgctgcctgcgatgcttaaaccacactgccgcgtggctaattatcgcaaacaactgttaattctggaagtctctaatgcggcacagatgacccggctgcgttacgaacttcccgcactgcgttctgcactgcgccgggagattttaccatcattatcggccatcgacatcaaaatcaatccgtcattgatgaaatcatcagcaacagggttaccgggtggtgataaaagcagcaattcagatagcagagggcaaaaaacagcggagccgggacggagattaagtgcggagagtgccaattcactgaaagcgctggcgcagagaagtccggaaaaactgaggaagaagctggagaaattggctgcactggccggagagagtaccagtgcagcagattaagcagacggttatttggtaaataacgtcagtgacaggagtgtcagggtcagagcaacgagctgtggcgccatgacctgattacgccagtacggttgacggtgcacggaatgcaaccggcatctgtgcttcgttctcgaatgtcacgagttcccaggcgctctctttagccagaacagcctgaagtaacttgttattcagtgcgtgaccggatttgaatgcggtaaaggcaccaatgatattgtggccgcacataaacaggtcaccgatagcatccaacattttgtgacggacaaattcgtcttcaaaacgcaggccatcttcattcagtacgcggtaatcatccaccacgatggcacagtcaaaacttccgcctaaacataagcctttggactggagatattcaatatcccgcatgaacccgaaggtacgtgcacggctgatatcccggacaaagttttccgcagagaagttcatcgcgtagcgctgagtgctggaatcgatcgccggatggttgaaatcgatagtgaaatctaagctgaaaccgttaaacggagagagttcagcccacttatcaccatcttcaacacggacggtctctttcagacgcaggaatttcttcgcactgctcagttcttcaataccggcatccagtaacaggaatacgaacgggcttgcgctgccatccataatcgggatttcagcggcatcgacttcgataaccaggttatcaatgccgagtccggccagtgctgcgttcaaatgctcaaccgtggaaatacgtacgttgtcttcatttaccagacaagtacataacatcgtatcacgcacggatttcgcatctgccggaaaatcgacaggcggattaagatcagtacggcgatagatgatcccggtattggccggtgccggacgcattgtcagcgtaacttttttgccggtgtgtaaacctacacccgtagcctgaacaatacgctttaatgttctttgtttgatcatcgtttctgtctcgtttgattaactgtctccctgtcattataaactaatgacaagggagatagtttagcacaaaaagcggagatgcaaatcttttcggtttaatcagcctgtttgcgtaagaaagccgggatatctaaataatccggttctttattgctctgggctgaagaatcgttgacaacctgtgccactgatttgctctcatccatgctggtcatgctgttttgcatttgtgcataacgatgttccatgttgttggtctgcaccgctttattggttaccagcgtgatttcaggacgtttgtccatgccgataccggtcgcgaccacagtcacacgcagttcatcgttcatttcagggtctaaggaagtaccgataaccacagtcgcgttatccgatgcaaatgcacggatagtgttacccacagtttcgaactcatccagacgcaggtcaaagcccgcggtgatgttaaccagcacaccacgcgcacctgacaggtcgatatcttccagcagcgggctggaaatcgccatttcggcagcttcttccgcacggtcttcaccgcgcgccacgccggagcccatcatcgcgtaacccatttctgacatcacagtacggacgtccgcaaagtcaacgttcatcaggcccggacgggtgatcagttctgcgataccctgaaccgcgccgcgtaacacgtcgttggcggcaccgaaggcatccagcagtgagatcccgcggcctaatactttcagcagtttgtcattcgggatggtgatcagtgagtcaacatgcttggataactcagtaatcccctgctcggcgaatgccatgcgctttttgccttcaaagttgaacggcttggtcaccacagcaacagtcaggatgcccagctctttggcaacttcagcaacaacaggtgccgcaccggttcctgtaccgccgcccataccggctgcgataaagaccatgtccgcaccgtcgagtgcattgcgcagcgcttcgcgatcttcttccgccgcgttacggcccacttccgggtttgcacccgcacccaggcctttggtgattccgttaccaatctggatagtctggccgacggcggttttacgaagcgcctgagcgtccgtattcacagcgaagaactcaacgccttcgatgcgttcacggaccatatgctcaacagcgttaccgccgcccccgccgacgccgatgactttaatcaccgcgtcgttggtcaattccatcggttcaaacataatctctctccgttttgtgcctttcttatatggcggctattatcgccagccttaatacaaattaaaattcttttctgagccagccagttaattttttaaaccaactgcccaccgaggcacgtttttctgtctcggtatcgccgaccaggtgagattcttttccgtaatgcagcaaccctaccgctgtagagtaatacggttcctgcgcataatccgttaagccggttatattaagcggttgtccgatacgaacctgtgtatggaaaacacgctgggcgcactcaaccagtccgttaatctgagccgcaccacctgtcagcacgataccagcggccaaatggtgtttgacaccctgctgacgtaattgttcctgcactttcaaaatttcgtcattaaccagattgagtaattcggtgtaacgcggctcaataacttcggctaatgtctggcgctgtaaactgcgcggcggacgcccgccgacactcggtacttccagggtttcgtctttgctgaccagagaccccagcgcgcagccgtgacggactttaatggcttccgcatcattcggcggcgtgccgaaggcgtacgcgatatcgccggtcaccacattccctgcatacgggataacacgggtgtgacgcagtgcgccgccggtgtaaatcgccatatccatggtgccgccgccgatatccacgacacagacacccagctcacgctcatcttccgtcagtaccgcgaagcttgatgccagaccggcaaaaatcagctggtcaacttttagtccgcagcgctcaacggctttgacaatattctttgccatgtcgttatgacaggtgatcagatgcactttcgcctgcatccgcacaccggataatcccaccggatttttaatgccttcctggtaatcgatggcatattcctgcgggatcacatgcagaacgcggtgctcgtcgcggacacggacagatttcgccgtatgcaccacattttccacatcttcctgggtcacttcttcttctgaaatcggcaccataccgatttcattctggcagctgatgtgtttgccggataacgccagatagactgatgatatctggcagtccgccatcagttccgcctggtcgatggcacgctgaacgcattttaccaccgactccagatcattgacgccgcctttgtccattccgcgtgacgggcagttacccgcaccgataatgttcaccacaccgtccggcagaatttcaccaacaagcgcagatactttggcggtgcctatttcgaggccgacgactaattttctatccgttgctttgatcattgttattctgcccgccttctttacctgttatgtcttaatgtccgtttgcgaaaggatcgatctgcaatggcgcccagccgaccgcagcaccgctgtcatagcggagatcgacataatcaacccgtttgtcctgttcctgcgtcagggtcggatacagctcgatgaaacgctgtaaccggcctttggtatccagccgtccgagttcaacccggacatcattatccagcacaagctgccaggcatgacgcggtgacattgaggctgatttgattttcagccctgccccgctgagctgctgcgccatttcacgatacccgctcagtacatcctgttcactgccctgtgctccgtagagcatcgggaaagaatctttttctgtcagttccgccggcaggctgaaaacccgcccggcgtcatcaaccatctgtgagtcattccagcgtgcatacggcacatactcgaccagatgaatttttaattcgtccggccactgcttgcgcacagtgacctgacgtaaccacgggatccgttccagctgctgctgcacttcattgacatccagtgtcatgaacgtaccgggcgttccgagggataacaccgctttgcgcacattgtcgtttgtcgtgtaatggcgctcaccggttaataccagttttgacatcggcaggcggtctgcatctttcatccagttcagcaccatcagccccccccagaccagcgttcccagcaccatcaggaaaaacagcagtccggcaaggtatgcgccgttactgggacgtgaaccgtcataatccgtatccggatccggttcacgcatattcagtgcagcctgtgacatatcagtccgccagtgccagaacgtccgccacaaaagcggagaagctcatgcctgcctgacgcgccgcctgcggcaccagactgtggttggtcataccaggggaagtgttcacttccagcaggtagaactgcccgtcactgtcgagcatcacatccacacggccccagccttcacagcccacggctttgtaagcagcttttgccagctcacggatttctgtctcgcgtgccccttcgaggcccgggcagaaatattgtgtgtcgtcagaaatatatttggcttcgtagtcgtagaacaccgccgccggctgaatacggatagacggcagcatctgctcaccgaggaagcccacggtgaattccgggccgctcagccatttttccaccagcacgtctttgtcgtgtttaaacgcttcttccagtgccggacgcagcgcctgcgcattatccactttggacataccgacacttgaaccttccaggcttggtttgacaatcaccggataacccagcggtgccacaccctgctgcaattcttcatcgctgatctgcgcgaaacgggctgcactgatggcgaaatacggcgcaatcggcagacctgcgcccgcccacagctgtttggtgcgcagcttgtccatagagagtgcggaggccatgacaccacttccggtgtacggcagtcccatctgctccaggcaaccctgcagtgtgccgtcttccccgccgcggccgtgcagcgcgataaagactttggtaaaaccgtcttccttcagacgggtaaccggatactctttggtatccacaccgaatgcattaataccggcttcttttaaaccggcgagcaccgccgcacctgaagccagggagacttcacgttctgcggatgtaccgcccatcagtaccgcgactttttcagtcattcttaattatcctcactcaaaaccggccgtaattttgtgtcagccaatgtacgcgctattttaccgatatttccggcgccttgaaccagtattaaatcattatcttcaagaacctgtgccagaaccgctgcaattttgcccggttcggtgaccagaatcggatccagcttaccgcgctggcggattgtgcggcacagcgagcggctgtccgcccccggaatgaccggctcaccggcggcatacacatccagcatcagcaggatatcgacctgatccagcgtgttggcaaaatcatcatacaggtcacgggtacgggtgtagcggtgcggctgaaacaccatcacaatccgcttatccggccagcctgctcttgccgctttgatagtcgcatccacttcggtcgggtgatggccgtaatcgtccaccagcatcacactgccctctttctggttgacgtgctccagcgggaagttgccgaggaaatcaaaacggcgcccggtaccctggaattcacgcagagaggccaggatatcctcatccagaatgccttcttctgtcgcgaccgcaatcgccgcggtggcattcaggacgttgtgacggcccggtgcattcagttccacagtcagatccggcagattctcccggtgaacggtgaagaagcactgtgagccgcgctgttcaaaatctgtgatacggacatccgcatcctcatgaaaaccgtaggtaatcacataacggccgatacgcggtacgatttcgcggataaccgcatcatccatacacaccacagccaggccgtagaacggcaggttgtgcaggaaattcacaaaggtgtctttcagggtttcaaaatcaccgtgataagtatccatgtgatccggctcgatattggtgaccacggccaccatcggctgtaaatgcaggaaagaagcatcgctttcatccgcttccgcaatcaggtaacggcttgagccgagacgcgcatgcacaccggcagctttaaccagcccgccgttgacgaaggtcggatccaggccgccgcggccgtaaataccggaaatcatcgccgtggtggtggttttgccgtgagtaccggcaatcgccacaccgtggcggaagcgcatcagttccgcgagcatttccgcgcggcggatcaccggaatacgggcttcacgcgccgcaacaatttccgggttatccgctgaaatggcggtggataccaccaccacactggcgtctgccacgttttccggacggtgattgaaataaatcgtcgcgcccaggttagtcagctgttttgttaccgcattcggcgccagatcagacccgctgatctcataaccttcgttcgccagcacttccgctatcccgcccataccggcaccgccgataccgacaaagtgaatgtgccggacacgtttcatttccggaatgaaggatcgtaatttcgccaattgctgtgtattcacgttatttcttcgctatatcaattcgttagtgttttttcgctgccgcgataattgcatccgccacccgtttggtggcatcggtaattgcgacactccgtgctttttccgccatggtcagcaggcgtggtctgtcccactcgcgtaactgctctgccaccgcctgtgcattaaaggacggctgttccatgataaccgcagcacccgcctgttccagcggcagcgcattccagtattgctggcggtctttatgcaggaacggcacaaaaatcgcacccagcccgaccaccgcgatctcactgacggtcagcgccccggagcggcagataaccacatccgcccaggtataagcttcaaccatgtcatcaataaattctgtgactgtcacactgtctgacgcattctgcgcgttatacagcgcttgtgtgctttctgcactgcctttaccggcctgatggcggatacagactgcatcccccataatcccggccacttccggcagggtctgattcaggatacgcgcgccctgactgccgccgatcaccagaatacggattggcccttcacgtccggcaaagcgttctgccggggacggcagactgaggatatcctcccgcaccgggttaccgaccaccggagcctgcgggaacgctcccgggaatccctgtaatactgtggtggcgattttcgacagccagccgttggtcagcccggccacaccgttctgctcatgcaggatcaccggaataccacagcgccaggcggccacaccaccgggaccggaaacaaacccgcccatgccgagcacggcatcaggctggtagtcacgcataatttttttcgcctgttttaccgctttcgcgatacggaacggcgcggtgagcagcgctttcacgcctttgccgcgcagaccggtaatctcaataaaatcgatatcaatgccgtgtttcggcacgagctgagcttccatccgatcacgggtacccagccagcggatttcccagccctgactctgtaaatagtgcgcaaccgcaagccccggaaagacatgtccgccactaccaccggccatcaccatcagacggggggctttattactcatcgcgctctccttgagaatgcctgggcttttgccaggcgtgtttcaaaatcaatccgcagcagcaaggcaatggctgtggtcataatcactaaactcgagccgccgtaactgatcagcggcagcgtcagccctttggtcggcagcatgccggaggctgcaccgacgttaaccagggcctggaagctgaaccagatgccgatggcacaggccagaaaaccggcaaaacgctggtcgatcatcagtgcgcggcggccgataaccatggcgcggaatgcgacaaaaaagaccatcagcagcaccaggatcacaccgaaataccccagttcctcaccgaggatggcaaaaataaagtcggtatgcgcttccggcaggtattccattttctgaatggagttgcccagcccctgaccgagataatcaccgcgcccgaaagccatcagtgactgtgttaactggtaaccgctgccgaacggatcttcccacgggtcaaggaaggaggttacacgccgcatacggtaaggttcggcaataatcagcagcaccactgccgcgacaccgccgccgataatcgcgataaactgccacattttggcaccggcgaggaaaagcagcgccagtgtggtgacaaacagtaccaccacggtaccgaggtccggctgtaacagcagtaacaccgccagcacaaacatcacgcccatcggcttgcagaatccccagaagttatttctgacttcatccaccttgcgcaccagatagctcgcgagataaacaaacagtgccagtttcgatacttccgcaggctgaatacgcatcggcccgatagctatccagcgtgatgccccgttaaccgagctgcccacgccgagtaccacaatcagcccgccgatcgtaccaatcagcagtaatgtgctgtagcgctgccacatttccagcgggaaccgcataatcaccgcagcgataataaaagcaaaaattaagaagccgccgtcacgcttggcaaaatagaaaggatcatccgccagacgctgcccgacaggcatagaggcggaagtcaccatcacaaagccaatcgcggccagtcccagtgcaaaccacagcagtgtccggtcatacatcacgaccgtactgaactcgccgttacgctcgccgatcatccagtttttaaaacgctgtgatccggggaatctcatgccgctaactcccgtgccaaacgggcaaattcacgcccgcgctcttcaaaattacggaactgatccaggctcgcacaggccggtgataacagcaccatatccccggcggccagtgacggcgccagtgcccgcattgcctgctccatggtatctgtcagcagagagacatccggacgcagctgcgccagttgttcgccgtcacgcccgaagcagtaaagacggattttttcgccgctcaggtacggcagcagcggagagaaatccgctgatttaccgtcaccgccgagcagcagatgcagacagccgtccacctgcaggccgttcagcgccgcttcagtactgccgacgttggtggctttggaatcatcaatccagcggatcccggcagattcatgtaccagctgaaaacggtgcggcagaccgctgtaagtgcgcagtgctttcagtgcgccttcacgcgggatattgaccgcatctgccagtgccagggctgccagggcattacagtagttgtgctggccgtgcaggatcatctcactgcagttaataattttttcaccgcagaagcagagtgcctgctcatcggtatccagccagtaatccccggtttcgacgccgaagctgacatattctgcgcggtcacaatcacagcctggctgtgtcagtgcatcttccgcgttatacacgcagacggcagcgtcgtgatagacacgtagttttgccgcacggtactgctccagtccctgcgggtagcgatccatatgatcttccgtgacattcagaacagtggccgccgccggtttcaggctgaatgtggtttccagctgaaaactggataactcaagcacacagagctcgtaatcgtctttcagcagttccagtgccggcaggccgatattaccgccgacaccggtacgcagaccggcacagcgccccatttcccccaccagggaggtcacggtgcttttgccgtttgagccggtgatcgccacaaccgggacagtcacttcgcgggcaaataattcaatatcgccgataatttccgcaccggcctgcgccgctgcctgcagttgcggggtactgaccgccactcccgggcttgcgataatcaggtctgcatccagcagccactgcgcttcaagaccaccgcagtgacactgaacgctgtccggcagcttatcgatgccgggcggggagatgcgggtatccatcaccttcggcgtaacgccgcgtgacagaaaaaagtccacacaggaaagcccggttaaaccgagcccgacaatcacaatgtctttcccctgataattcgtcatgattaacgtaccttgagtgtcgccagaccgatcagcactaacatcagggagataatccagaagcggacaatcacccgcggctcaggccagccttttaattcataatggtgatgaataggtgccatccggaaaatacgctgaccgcgtaatttgaaggatccgacctgtaaaatcaccgacagagtttccaccacgaatacaccgcccataatcagcagcaggaattcctgacgcagcagaacagcaatggtacccagcgcgccgccgagtgccaatgaaccgacatcacccataaagacctgtgccggataggtgttaaaccacaggaagcccagccctgccccgacaatcgcggtgcagacaatcaccagttccccggcatgcggcagatacgggatatgcagataatgcgcgaaattcacgttaccggtcgcccacgccaccagcgcaaacccggcagccacaaagacggtcggcataatcgcgagaccatcgaggccgtcagtcaggttcaccgcgttactggtgccgacaatcacgaaatacgccagcaggatatacagcacacccagctgcggcatcacatctttaaagaacggcaccaccagctgggttgccggggtatctttaccgatggcatacatactgaacgccacagtcagcgccagcacggactgccagaaatatttccagcgggcaatcagccctttggtgtctttgcgcaccactttgcggtagtcatcgataaagccgacaataccgtagccgatcagcaccagcagcacacaccagacatacgggttgtccagacgcgcccacagcagaacagaaatggcgatggagaacaggatcatcatgccgcccatggtcggggtaccgcgcttgctgaagtgcgattccggcccttcgctgcggacaacctggccaatctgcattctctggagatacgcaatcacatgcggccccatccataatgcgataatcagcgaggtcagcaggccgacgatggcgcggaacgtcaggtaagagaagacgttaaacgcggtatgaaactgcaccagatactcagccagccaaatcagcatgggacattctcctgcaaggcgtgcacaacttcttccattgcggagctgcgtgaacctttaactaaaattgaaattgatgaatgctgtgccaccagaggtgccagcgcagcaatgagggttgttttgtcagcgaaatggtgtccctgacactcatcactgataaaatgactgaactgacctgcggtgaacaccgcatccagcccggcatcacgggcagcctgcccgactctgcggtgactctcttcggcgtaaccgccctgctcgccgatatccccggcaaccagcacgcggtaacccggtaattgtgccagcacacggattgccgcaatcattgagccgtcattagcattgtaagtgtcgtcaatcatcagcttgcccggtgccagttcaaccgggtataaccgtcccggtacggcgctggtttgtgccagaccactgcagatatccaccagtgtcgccccggcagacagtgccagtgccgccgccgcgagagcattggcaatattgtgacggcccggcagcggcagggtgacagcggtgctgcctgccggtgtgtgcagggtaaagtcagtggtcagcgggttcatcaccacatctgccgcgtaaaaatcggcctgcgggtgcggatcaacggagaaactccagcgggtctgacgcggggtcagatgtgcctgccagtgagtgacatcattgctttccagattgatgacagcggtgccttcgtcagtcagtccggtgaaaatttccccttttgcctgcgcgatggcttctgcggaaccgaactcgccgatatgggcggcaaacaggttattcaccagtgcggtctgcgggtgtgtcatggcagcggtataggcgatttcgccggtgtggttggcacccagctcaatcaccgcaaactgatgtttttctgtcaggcgcagcaatgtcagcggtacgccgatatcattattaaagttcccggcggtaaacagggtttcgccagcctgctgtaaaatcgccgccgtcatctctttgacagacgttttgccggacgaaccggtcagcgccaccactttcgcctgactgcggtcacggttgcctttcgccaccgcccccagcgcaaggcgggtatctttaacaataatctgcggacagttcacgtccatccggcggttcaccaggacggcggcaacacctttcgctgccacatccgcaataaaatcatgagcatcaaaacgttcaccggccagggcgataaacagcgcacgttcaccgatagtgcggctgtccgtggtgacactctcaatccgttctgatgccgcgtggccgctgaggataagctccccggcggtcagttgtgcgatatcagcgagggagaacgggatcatgccattactcccagcaggcgggcgacggtcaggcggtcggagtagtccagacggcggttgccgaccagctgataatcctcatgcccttttccggccaccagcaccacgtcatccggttttgcctgcatcaccgcaaaggtgacggcttccgcacggcccgggatcggcagtgcacgggaggtatcaaccagcccggccataatgtcattgataatcgcctgcggctcttcgctgcgcgggttatcgtcggtgatcaccaccacatcggattcctgctcggcaattgcgcccatcagcggacgtttacctttgtcgcgatcaccgccgcagccgaagacacaccacagtttgcctttggtatgcagacgcgccgcactcagtgctttttccagcgcatccggggtgtgagcataatcgacaacaactgtcgggcggttatccgcggtgaaaacttccatccggccgcagaccggggttaacgcggttgcagcgcgcagcagtgtattcaggtcataatccagtgccagcagggttgccgcagccaccagcaggttactgacgttaaaggcgcccatcagcgggctgtccagctcaccattgccccagcttgaggtaaaggtgatgtgcgcaccgctgtcatgataatccacagaaaccgctttcaggaaacgcccctgccagccggccggcagattatcatccatcgtgaccgcgaccgcttccggtagttttgccagccatttcagccctgtctcatcatccgcattaataattttttgttcgctgtgatgggttgagaacagcagccatttggcggcttcgtagttggccatatcaccgtggtaatcgaggtgatcacggcttaagttagtaaagaccgcagcccggaacggcagtgccgccacacggctttgtaccagtccgtgagaggagacttccatcgccgccactgtggcacctttcttcgccagtttgtccagctcgagctggatatcaacagctgaaccggtggtgttttcagtcgggatcacatgcccgagcagcccgttacccaccgttcccatcacggcactggtttcgcccatcgcctgagtccactgcgccagcaactgggtggtggtggttttaccgttagtgccggtcacgccgatcagtttcaggcgttccgccgggtggtgataaaactctccggccaggcgggataatttttcattcaggtggctgagatacaccaccggtacaccatgcagaacctgcacactgccgtcttccgccgcaccatccgcttccgcgaccacagcagccacaccctgggcaatggcctgaggaatgtagtgacgtccgtcggactggtggcctttaaccgccaggaacagatcaccggcagccgctttgcggctgtccagggtcatatcacgtaacgccttagccggtgcatcaacaccgagcggcgcgagtaaatcgcgcaaattacgatctgccacttgtaccctcttttggtttattaataaccacttcattagtttgttcttccggtgtcagcgcatcgggttccacgttcattgtccgcagaacaccgcccatgatggcaccgaataccggtgcagagatcgcacccccgtaatacttgccgccctgcgggtcgttgataatcacaaccagtgcaaaacgcggacggcttgccggtgcaaccccggcggtgtaagcgatataacggttcacgtatttgccgtcatcgcccacttttttcgcggtcccggttttaatggccacgcggtaccctttaatcgcagcgcgcgttccgccgccgcccggtaacgcaacgctttccatcatctgaaccacggttttcatcaccggctcagggaagacgcgggtgcccggcaccggcggatccacttttgtgatggacagcgggcggtaaatcccgaaactgccgattgttgcataggcccgtgctaactgtaacggtgttaccatcagcccgtaaccgaaagaaaaggtggccctttcaagctcagaccaccgtgtttttttacttgggtatatgccactgctttctccgaccagccccagattggtcggttttcccagcccgaaacgcgaatagacgtccacgagttcctgagcgggcatcgctaacgcaagtcttgagacacctacgttactcgacttctgtaaaataccggtgatggtcagttcggcataacgcgccacgtctttgatttcatgaccactgatccggtacggataagtattcaccacgctgttcggtttgatgatgttgttgtgcagtgctgtcatcaccaccaacggttttaccgtcgagcccggttcaaaaatatcggtgatagcgcggttacgcatagcatctttcggcgtgccctggaggttgttcgggttataggacgggctgttcgccatcgccagaatttccccggtgttcacatccaccagaatcgccgtgccggattccgctttgttcagtgccaccgcactgctgatttcgcggtataccagcgcctgtaaacgctcatcaatactgagtgtcaggttgtgcccggcctgactttcgcgggcgatagtatcttcaataacacggccgccgcgatctttacggactgtccgctgccccggaaccccggtcagccagcggtcaaagcttttctcaaccccttcaatcccttcatcatcaatattggtgacaccaataatgtgagcagtcacagagcaggacgggtaataccgttttgattccgcctgtaaataaatccccggcagattcagttttttcacataatcgccgatagtcgggttcacctgacgcgccagatagacaaagcggcctttcgggttcgccgtgactttgcttttcacctgttcgagcgggatattcagcgcttcggacagtgcgcgccagcgggtgtcatcccctaccccgcctttgtcggctaactctttcggatcagcccagacggcgtttaccggcacactgaccgccagcggacgccccatacggtcgctgatcataccgcgtgcggtcgggatctcctggacgcgcagcgagcgcatatcgccctctttgaccagcatgtccgggttgataatctgtaaatacgcgacccggatcagcagggcggccagggcaagcccgataccgccgcataacaacgcaaaacgccagctgataaaactggctttttcttccggacgtttgatacgggctccgccctgcgttttgcctgctgattttctgcttttcatgccttcgtcattttgttacgacaattttttcgtttgccggatccacatgctgcatactgagacgctcaacggacaggcgctcaacacggctgtgatcccccagggcgttctcttccagaatcaggttacgccattcgatatccagcgagttacgctccagcacaagatgttcccgctctgcggtcagcagacgtgttttatgtgccgtgatgactacaaaaatcgcgctgacgatcactgcgataaataaaatcgcagggataaatccgtggcgcagcaggtcacgacaaataacgcgggctaaattgtgccgttctgtggtcatgctttctccgcaaagcgcagtaccgaactgcgggcacgcgggttaacactgatttcctgctctgacggtttcatttttccggccagtttcagtgccggtgtgccgtgcgctttcagttgttcttccgtcagcggtaatccgtgcggcacctgtggtccgcggctttcatcacgcataaactgcttcacaatccggtcttccagcgagtggaagctgataaccgataaccggccgccctgagccagaatgcccagtgcgccggtcagcgcctggcggatctcatccagctcgctgttgacataaatgcggatagcctggaagctgcgggtcgccggatgcttgtgcttttctttcaccggagacacagcggcaattaaatccgccagctgttttgtccgcgtcagcggctcttcggttttattgcgttcaacaatcgcgcgggcaatccgtttcgaaaaacgctcttcgccgaaatttttcagcacccacgcaatatcttcttctttggcttcagtcagccactgtgcagcggagatcccgcgggtcggatccatccgcatatccagcggcccgtcacgcataaaggagaatccgcgttccgcgtcgtccagctgcggggaggacacacccagatccagcagaacgccattaatctgtccgcccagttccagatcattcacataaccggcgataccggaaaacgggccgtgaataatggaaaaacgcgggtcgtcaatctgtgccgcagcggcaatcgcctgcggatcccggtcgatggcgatcagacgcccctgcggaccgagttttgataaaatcaggcgggagtgcccgccgcggccgaatgtgccgtcgatataaatgccgtcttcgcggatctgtaatccgttgacggcttcatccagtaaaacactggtatgctgaaactgactctctgccatttaaagtgataaatcctgtaaccgggcggataaaggtccggatgccgtctgcccggcagcaatatcatcctgtacctgctgataccacgtctgctcatcccacagctcaaacttgttgaactgcccgaccagcatgacttctttggttaaccgcgcatgtgtgcgcagtgtaccggctaacaaaagacgtcccgcactgtccatctgacattccgtggcatggcccagcaacaggcgctgaacacggcgctctgtgggatccatggtggacaattgtgccagtttcagttcgatcagttcccactccggtaaggtgtaaagcagcaggcacggctggtggagatcgatagtgcagaccatctgaccttccgacttttcagcaagcagcgaccggtaccgtgccggtacggttatgcgccctttgctgtcaagattaaccagtgttgccccgcgaaacattcgtttctccgctcagttttgccctgaattaccactttcacccacaattccccaccaacagagtttacgaatggtaggaaaagcttgtcaagccagagctgacaaggtttcgtttccgctgtcggggaataaaggggtgagaaaatatgggattttttgcttcagggaacagaagtgaggtaacacactgattcaaatcagaaaaaaattcacataatacgcactcggctaaccggggcaaattataccgaatctggcgaaagaaagatgcatttttgcgaggtgtccctcactttcaggataaaaattcaccatcaccgcaaagaccccgggatttttgttccggtcatctgtgctgttactttctgttacacagcgtgattatttgatatttgaaaatttaatattcagtttatcaatagcataactgtcacaaaaccgggctaatgatattctgcggcatatacccttaattggagtaagtgaatttccggggaatgaaaggtgtagtgtgaaaattgtcaatttctgtcaatcagcagaattgaaaaaaattcttaggattcctctcaaaaagggtttttcatctgtttccggacaaaccaaacaaaaatacctatacgtttccgtacaggtatcggtaaaaataatgattttactgcctgaatattaccggcggctcagacttccgcgacggcacagatcacgacggatccgggtgatacccgcagccggtttctgtttttcatccagactggccagtaccagctccagcacacgctccgcaatatcgcggtgacgctgcgccacggacagtaccggacactcaaggaaatcaagcagttcatgatcaccgaaggtcgcgatcaccagttgccccggcagacggccgctgcgggccagcgtggcatccatcaccccctgtaacagggcaaatgaggtggtaaacagcgcatccggcatcggattgctttccagccaggtatcaaacgctttggcggcggcatcacgctcatagctgtcggcatagaggaaattcacgttacgtgcatccccttcccaggcttcgcggaatccctgttcacgcaggaaactgacggaaagttccggcaacgcgccgagatataccaccgattctgccgggaactgacgcaattcggatgccagcattttggcgtcctcaaagtcatccccgaccacactgataaagtgctcattttccagtgcgcggtcaagcgcgacaatcggcagggagcggtttgcccagcgctgatagaacggatgctccggcggcagtgcggtggaaacgataatcgcatccacctgacgctgtaacaggtgttccacacaacggatttcgttgtcaggctggtcttcagagcaggcaatcagcaactgataaccacggctgcgcgcctggcgctccagataatttgcgatgcgggtgtagctggtgttctccaaatccgggatcaccagtccgatagagcgggtacggcctgcacgcagaccggcagccaccgcattcggatggtaattatgttcacgaaccaccgccatcactttttcgacagttttgtcactcacacgatattgttttgcttttccgttgatgacataactggccgtcgtgcgcgacacaccggcaaggcgggcgatttcatccagtttcacgttaaccccttacaaatcaggaaacggcccgaacaacgggccaaataagaagagtaatcagtttaccctttcaccgcgaatatttcaccgcattattttatcgccgcgcgacatcccgacgatgccggagcgggcaatttccacaatttccgcgaagccgcgcaccgcatccaggaaggcatccagcttttcactggtgccggtcagttgcacggtataaagcgtcgcggtcacatcgacaatctgtccgcggaagatatccgtactgcgtttgacctcatcccgcccgtagccgctggcctgtaattttaccagcatcacctcgcgctcaatgtgagtggcagaggtcagttctgtgacacggaacacatccaccagcttattgagctgcttttcaatctgctccagcacccgcgcatcgcctttggtctggatggtcagacggaacagtgacgggtcatcggtcggggcggcggtgatactttcgatattatacccgcgctgggaaaaaagccctgccacacgggacagcgcccctgtttcgttttctaataaaattgacagaatccggcgcatgatcaggtcctctccgttttgcttaaccacatttcatccattccgccattgcggatctgcatcggataaacatgctctttctcatccaccatcacatcggcgaacaccagtcgtttctcttcgcggacaatgcgcagtgcctccgcaagctgttcacgcagcgtggctttatcactgatactgataccgacatgcccgtaagcctctgccaggcggacaaaatcaggcagcgattccatataggagtgtgagtgacggccgtgataaaccatatcctgccactgcttcaccataccgagaaagcggttgttaagattaagcaccagtaccggcagcccgaactgtaatgccgtggaaagttcctgaatattcatctggatactaccgtccccggtgacacacaccaccatatcatccggtttcgccagccggacacccagtgccgccggtaacccgaagcccatcgtgcccagcccgccggaattgatccagcggcgcggttcatcaaacggataatagagtgcggcaaacatctgatgctgaccgacatcggaggtaacatacgccttcccttccgtcagttcccacagggtgcggatcacagtctgcggcttgattttctcaccgctctcatcaatggccagacactgtttcgctttccactgatcaatgcgccgccaccagtcgcacagtgcatccggatcctgttcatcggtcagagattcaagctgtaacagcatctgcgcgagacacagtttcgcatcaccgacgatcggaatatccgctgccacggttttggagatagacgccggatcgacatcgatatgaatgatggttgcctgcgggcagtacttcgccaggttattggtggtccggtcatcgaaacggacaccgacggcaaaaatcacatcactgtgatgcatggtattgtttgcttcatatgtcccgtgcatacccagcatgccgacacactgcggatgagtgcccggaaacgcgcccagccccatcagggagagcgccaccggcagacgcagtttatccgcaagggtgaaaatctccggactgcatccggcactgacagcaccgccgccgatatacattaccgggcgtttcgcctgcatcagtgtgataagcgcgcgtttgatctgccctttatgaccggctccggtcgggttataggagcgcaggctgacccgtgacgggtagctgtactcatgctgctgctggacaatatctttcggaaaatcgatgaccacaggtcccggacggccgctctgtgccagatagaatgcttttttgatggtggccggaatatccgcgacatcatggaccaggtaactgtgtttcacgaccgggcgggaaatgcccaccatatccacttcctggaaggcatcgttgccgatcagcgcgctcgccacctggccggacagcaccaccagcggcaccgaatccatatacgcggtggcgataccggtaatggcgttagtcgcacccggaccggaagtgaccagcaccacgccggttttaccggtcgcgcgggcatagccgtccgccatatgcacggcggcctgctcgtgacgcaccagaatgtgcccgacaccgcccaccgtatgcagtgcatcataaatatccagaacagcaccgcccggatagccgaatacgtgtgacacgccctcatcaattaaggagcgcacgatcatttctgcccctgtcaacctctccataaatgctctcctgcccgtgattgcgggttgtaactgcaagtgatgtgtttgtctgtttttagttatctgaggattaacataacgataaaatgacagtgctggcaaatgcgtttttcgggacgcaaaaagcggaaaaccacaggaataaaggaaatgacaggatccgcagacgatcatacctgcggcggcaaatcacaaagcagagttcactgagagcgggggaaaaaccggcgggatataaaaacggcactgcacaggaaacaggcagtgccgtcagggacagcaatcagtccgtgtacatggactcaatttcgcgttgatagcgctgggctatcactttacggcgcagtttcagggtcggtgtcagttcgccgagctccatggagaaattctgcggcagcagtgtaaaacgcttaacctgatgaaaggctgcgatatttttctgcaactctttcagacggctttcaaacagcgccacaatctggctgtttttcagcagttccatccggtcatggtatttcagattcagtgcccgggcgtgctcttccagagtatcaaagcacggcacaatcagtgcggagacaaacttacgtgcatccgccaccaccgcgatatgttcgataaagcgatcctgacccagcgtgccttccagcatctgcggcgcaatatatttgccgttcgaggttttcatcagatctttcaggcgttcggtgataaacaaattgccctgctcatccagcgcaccggcgtcaccggtccgcagccagccatcagccgtaaaggcctgacgggtctcttccggcttattgtaatagccgcgcatcaccaccggcccgcgtacctgaatctcattttcctcaccgatacgcacttccacatccggcagcggcacaccgatagagccgagctgataaccgctgttttcccagcaggataccgtggcacaggtttctgtcatgccgtagccgtatttgatgttaatgccgatggcgaggaaaaagcggataatttcatcatccagccgcgcacccgccgccggtaagaaacggacattaccgccgagcacatcacgcagtttgccgagcacttttttctgtgcgaactgatcacaccgcgcagccagccacgactgtttttcaccgcgctgctgtgcatcaagggtctttttaccggtccgtaccgcccagtggaataacgcccgtttataccacggcgcctgtgccactttttcgtaaataccgctgaatactttttcatagaaacgcggcaccgcacacatcacggtcggtttcaccgataccatcgctttgcgcaccagattggtatcactgagatagacattcagtgcgccggtgtgcatcacatagaaactccaggcgcgctcaaaaacatgcgtcagcggcaggaagcagagtgagacatcatcttcggtcagtgtcagccgctcatcatgcagataaagctgggcggccatgttgcggtaatccagcatcacgcctttcggctcgccggtggtcccggaggtgtaaatcagggtgaaaagatcgtcaagggaacaatcagcgatgcgctggcgcagctctgcggcgtaactgccgtcgtggccgttcataaactgacgcagtgtgcagaccgccggatgcgacgggattgccgtgttttccgggttcattatgatgattttctgcagcgacgggcagagagaaagcagtgacagcgcgatttccgcctgcttctgaccgtccacaaacaggatgcgcacctgcgcatcattaagaatataggccgcctggtcatcactgctggtggcatagagcggcaccacaatggcacggcactgaagaatcgccaggtcggttaatgtccacagagcgctgttgtgcgagaaaacggcgacattctcctgcacttcaaccccttctgccagcagggcttccgccagattttcactgaacgtcccggcctgctgccaggtaaaatcgatatgctgaccttgttcacaccactgtcgcagtgcgattttgtcaccccggcgctgtttttgctgttgcagccgcgtcactaaatgatagtgatgcaaatttgttgttgtcacacgcgtttcctttactgagccgtcagactgtacggtttcacgttatgtaataatttttcagcttacagttgtaagcttaaatttttccgcaagtgtagcctgttgtctccgggaacaaaagcaaatttagttatctttgcaatgacgggatcacaaaaaagccccggcaggtacatttgcctgacggggcgtgaaataaattaaatgatcgattacatatgatgtgtgaactgcgtcagcagtgccttcatccactgatgccctttatcgcgggtacacgcctcgtgccagatcagaaacgccggacggctgactttatcccacggcagctgcacttcctgaatcggcagcacatgagaatagagctgaatcagccatttcggtgcaatcgccaccagctctgttttagagacaatattcagtacactgactaaattggttccctgataaacaatagcccggagtaattcattattttcataatacggtgaactgaatgaatcaattaaatccagcgacaccacggcatgctgctcggtaaatatttgtttctctgttaccgtatattgtatacgtgggtgattgcgggcggcgaccagtgataactggtcattaaataataagtgatgactgtaatccggtttatcgaaacgattataactgacagcaaaatcggtttcctggtatttcaggttattctcgatatgtgaattcatataagactgaatattaacatcgatattttcactgtgaagtttaacctgttcgattattttgtctgtcaggcggatatccagcggactggagatggccagattaaatgtccgctcgctgctgcccggttcaaaaccggcacccggcagctcattatgcaccagctgcaatgcctgcctgaccggcccgaacagctgtttggcgcgcgctgtcggctgaattccccgtccgaaacggacaaataattcatcattaaacataactttaagtcttgacaccgcattgctgacagccggttgcgacatacctaaaagttcagcagcccgggtcacattctgcatctgcataaccgcatcaaaaacagtcagcagattaagatccacattacgcagctgtgtttcaccggattctttttttacatctgccactgaggtgtattcagtcatcttaaactccaataaatgattataatgacttcaataagccacctgccgccatgatgaaacggcagatcaatacaaaattgaaatctattatctcaattgattatccaattaataattgagtctcttccttgtatggttctgaatacgcgggtgcgcatcatcatcacaatgcatactatttaaatatttaaagccagtaaattattcatgccagtaataaatcaataccgctttattcatttagtttccatgcagtgagataataaaacaaagattgtgtttattcataataaaattgtcttctgtcagcataaaaaatccgattttttttactgacataacggaaagaataaactgttcaatgaatatctcaccggttaccggtggctgcctgaccgccggcccccctgttacccgcctactcaactgattctgattctccgtaaaaaaatctgcaaaaatattagcccaattatttagctggcttatagatgaaaacgctgattaatttttataaattagtcagtttatctgctttttgtgctttttttatcctttgaccggaatctccggcgaacctcgtgagttgacagggcattttatattcagtatcaataatacatcgccacggataagccctgtgctccgtgccactgaatttactgagaaggttattactatgtctttcactttccgcctaaacagcctgctaattatcgccttaactgcgcgtggcgggttcgtggccggaagttcctcataactttctccctgagacctgaaaaacccgcgcaatgtcgcgggtttttttatacctgcaaaccggaaaacagaacaagaaataaccgagaggatcacaacatgagcgataacgtcatcatttttgataccacactgcgtgacggggagcaggcattacaggccagtctcagtgtcaaagagaagttacagattgctttccagctcgaacgcatgggggttgatattattgaggccggtttccctgtctcctctcccggtgattttcagtcagtgcagactatcgcccgcgaaatcaaaaacagccgtatcgcggcattatcccgctgtgtgatcggcgatattgatgccgcagcggaatccctgaaagtcgcggaagccttccggttgcatatggtgctcgccacctccggtattcacgtcaaaaccaaactgcgcaagacctttgctgacatcatcgatatggcggtcggctcgattaaacatgcccgccgctttaccgatgacgttgagttttcctgcgaagatgccgggcgcaccgatatcgatgatttatgccgtattgtggaagccgcgattaacgcaggagccaccacggtcaatattccggacaccgtcggttacaccacaccgtaccagttcggcggcattatcagtgaattgttcaaccgcgtgccgaatatcgacaaaaccatcatttctgtccactgccatgatgatttgggcatgtccgttgccaactccatcaccgccgtacaggccggtgcccgccagattgaaggtacgatcaacgggttaggcgaacgcgccgggaactgtgcgctggaagaagtgattatggcgattaaagtgcgggaaaaaatgctgggcgtgcgcaccgggatcaatcacaaagagatttaccgcaccagccagctggtcagccagttatgcaacaccccggtaccgccgaacaaggccgtggtcggcagcaatgccttctcccactcctccggtattcaccaggacggcgtgattaaaaaccgcgaaacctacgaaatcatgacgccggacagcatcggcctgaaagataacttaatcaacctgacctcccgttccggccgcgcggcggtgaaacaccggatggcggaaatgggttatcaggaaggtgactataacctggatgaattatacgccgacttcctgcaactggcggacaagaaaggtcaggttttcgattacgacctggaagcgctggtgtttatgaagcagcagcaccaggagccggaacatttctcgctggcgttcctcaacacccagtcaggtaccggtgtcaaagcctccgcgatggtcagaatgcaggccggggatgacattatctcggaatccgcccaggggaacggcccggtggatgcggcttatgaagccatccgccgtatcgcgggttacccgctgaccctcaccgcctatcagctgactgccaaaggtcagggaacggatgcactgggtcaggtgaatatcgtggtggagtatgaaggccgtaaattccacggtatggggctggcgaccgatattgttgaatcctccgcccaggccatgatccacgccatcaacagcatctggcgcgccggacaggtaaaagaagaaaaacggcgtatacagtcagataacaacatgcacaacgatactcataacaacaatacagagacaaaggaagcggtgtaattatgtcggaacaatttcatattgcagttttaccgggcgacggaatcggccctgaaattatggcgcaggcgattaaagtgctggatgcggtgcgcacccgctttaacctgaccatcaccaccagtgaatatgatgtcggcggcattgccatcgacaaccatggccacccgctgccgccggccacactgaaaggctgcgaacaggccgatgcggtactgttcggctctgtcggcggcccgaaatgggaaaaactgccgccggactcccagccggagcgcggcgctctgctcccgctgcgggcacatttcaaattattcagtaacctgcgcccggcacggctctatcctgcgctggaagcgttctgcccgctgcgcagtgatatcgccgcacgcggattcgatatcctgtgtgtccgcgaactgaccggcgggatctatttcgggcagcctaaaggccgtgaaggcgaaggtaaatatgagcgtgcttatgataccgaggtgtatcaccgctttgaaatcgagcgtattgcccgtatcgcctttgcctccgcccaaaaacgccgtggccaggtaacatcgattgataaggccaacgtactgcaaagttccgtattatggcgcgaagtggtaacagaaatcgccaaagagtatccggatgtcgcgctgtcacacatgtatatcgataacgccgccatgcagatggtcaaagatccgtcgcagtttgatgtgatcctctgctccaacctgttcggcgacattatctccgacgagtgcgccatgatcaccggctccatgggcatgctgccgtccgccagcctgaatgagaaaaaattcggtctgtatgaaccggcaggcggctctgcgccggatatcgccgggcagaatattgccaacccggtggcccagattttatccgctgccatgatgctgcgcttcagctgcgggcaggatgcagcggcggacagcatcgaaaatgcggtcaatcaggcactgaatgccggataccgcacccgggatgtggccggaaacggcaagagtgtgaccacagacgaaatgggcgacattatcgcgcgtttgattacagaaggggcttaagatgagcacaggaaaaactttatatcagaaattatatgatgcccatgtggttcgtgaagaagcaaacgaaacaccgatcctgtatatcgaccgccacctggtgcatgaggtgacctctccgcaggcgtttgacggattacgggcaaaaaaccgcccggtgcgccgcccggaaaaaaccttcgccaccatggatcacaacgtttccacgcagaccaaagatatcaatgcctgtggtgaaatggcccgtaaccagatgcaggagctgatcaaaaactgtgaggcctttggtgtccgtctctatgatctgaaccatccgtttcagggtattgtgcatgtgatggggccggaacagggcatcaccctgcctggcatgaccattgtctgtggtgactcccacaccgccacccacggcgcattcggctcgctggccttcggtatcggcacctccgaggtggaacatgtgttagctacccagacactgaaacaggcacgggccaaaaccctgaaaattgaagtgcgcggcaaagttgcccccggtatcaccgccaaggatattgtactggcgattatcggtcacaccggcagcgcgggcggcaccggttatatcgcggaattctgcggcgacgccattgaagcgctctccatggaaggccggatgacggtttgtaatatggcgatagaaatgggtgccaaaggcggaatgattgcgccggatcagaccacctttgattacctgaaaggccgccagttctccccgcagggcacggactgggatgcagctgtggcttactggcagaccctgaaaagtgatccggatgcgaaatatgacgcggaaattattatcaatgccgccgatatcgccccgcaggtcacctggggcaccaatcccggtcaggtgattgatatcagccgggccattcccgcaccggagagctttaccgacccggtggaaagagcctcggcagaaaaagcgctggcgtatatggatttaacgccgggcaaaaaattaaccgatgtgaaaatcgacaaggtatttatcggctcctgcaccaactcacggattgaggatttacgcgcggctgctgccgtcgccaaagggcgcaaagtcgcgccgggtgtgcaggcgatagtggttccgggctccgggccggtgaaatcccaggcggaagcggaaggtctggataaaatcttcaccgatgccgggtttgaatggcgtttaccgggctgctctatgtgtctggcgatgaacaatgaccgtctggcaccgggggagcgctgtgcctccaccagcaaccgcaactttgaaggccgccaggggcgcggcggacgcacgcatctggtcagcccggccatggccgccgcagccgctgtcaccggcagtttcgccgatatccgtaccattgagatgcgctgagggagaaaaccatggaaaaatttattgtacatcagggcattgccgcaccgctggatgccgccaacgtggataccgatgccattatcccgaaacagtttttgcagaaagtgacccgcaccggcttcggacagcatttattcaatgactggcgttttctcgatgatgacggacaggtgccgaacccggattttatcctcaatgccccgcgttatcagggcgcatccattctgctggcccgtgaaaacttcggctgcggctcctcccgtgagcacgcgccgtgggccttaacagattacggcttcagagtggtgattgcgccaagctttgcggatattttttacggtaactcattcaacaaccaattattgccggtgaaattacccgaagacgcgattgatgcgctctttgactgggtacaaaaaacagaaggtgcacagattattgttgatctggagaaccagaaagtgatcgccggtgagctggaatatccgttcagtgttgataccttccgtcgtcactgcatgatgaacggcctcgacagtatcggcctcaccttacagcatgacgacatgatttcccgttttgaggaaaaactgcctgcatttatgaactgataaccggatccatttccaccattgaacccctgccatcaccccttttgtgatggcagcttttttccccgttttccccacctctttttccggatcaccggacagaaaaaaaccagcctttcggctggcggtaaaagtcaccattactcaagaatcgggagtgagtcaggtatcacactgacgtcatgagctgctttaatgacattgagtatggacgtaatatacggaaataaaaatggacagaaaaccgaccggagttcctcttttatgagcacaccacgcctccagcaccagtttatccgcctgtggcagtatcatcagggaaaggagaccgaaaccacccttcaggagatcgccgatatcctgcattgttcccgccgtcatgtccgctctctgctcagcagtatgcagacagcgggctggctcagctggcaggcggaaaccggacggggtaagcgctcacgtctttgtttcctgcagagcggacgggatttacagcacgcccgtgccgaactgctgatcgagcaggataatatcgaaaaactggtggcgatggtcaatgataaggacgcgatgcgtcagatggtattatcccagctggagcgcagcttccggcagggaaaaagcctgctgcgtattgtctattaccgccctttttataatttactgcccggttcgccgctacgccgctcggaagttcatctgctgagccagatttttaacggacttaccgcaataaatgaggaaaacggggaagctgtcccggcgctggcgcatcactggcagcagaccggtgacaaacagtggcgtttctggctgcgtccggcgatatttttccatcacggccgtgagttgcagatggtggatatcatttcctcttttgagcgcctgcgtgacacacacccgctgttcagccatatccgcactgtccgttccgatatgccttacatcatcgatatcacactgaatgaagccgacagctggttcccggtactgaccggcagcccgcacgccgccattctgccccatgagtggcaggaactgccggatttcgcccgccgccctgtcggcaccggtccgtatcaggtggtctgtaacaatgaccgtaaactgacgatccgcgcctttgaccattattacggcttccgcgccctgctcgacgaagtttcggtgctggtggtgccggagctggaagaaaaaatggtctgcaccaccctgcatatcggcgcggacgggccggagcgggattctctcgacagccggatggaggaaggctgctatttcctgctgcacgacacgcgttcagcaaaaggagagcgggaagatatccgccgctggctcaacagcctgatgacccccgtcaatctgctgtatcactgcgaacccctgtatcagcgccactggtggccggcttacgggctgctgctgcgctggcatcacagcaaacttatcccgccctgtgaaaaaccggctgacctgacagagctgacactgacctattatcaggatcatcacgaataccatgctatcggcaaattattgcagcagttactggcagaacagggtgtaaaactgacgattaatatcacggattacgacacctggtttaacggcgattgtgacagtgatttctggctggcgaccgccaacttttataagccgctggatttttcggttttcgccaccctgtacgagctgccgctgctgcgccgctgtctgggcgatgacctgcgtgcgccgctgaagcaatggcggcagcgttccctgtctctggcggcatggtgtgagcaggtcattgacagacagatgctgttcccgctgttccatcactggcttgaattacaggggcagcgcagtatgcggggcgtcaaaatgaataccttcggctggtttgattttaaatccgcctggtttatccccccggaaagttaattcacagaaaaaggcaaagttataaacaccctctgataaaaaaccggcttttattcacgttttctgtggatatagttgtgaaaaacgcaagggtaatgggggtatagtttttaactgccccctgttgataaaatcacaatctttaaataaaccctgttaaatcatatcagtacggaaataaaaacagagaatcatctgaaaaaaacaccggcattttttttcacagacttacacagcacaaaaaataaccacacccggtgttatccacagattgtgacttatccgtgagcaaaacccctgctgaaacgcgaaaacaggcggaagtcaagcctgtaaatcaaaccagtagtgaggctgtttttcacttatcccataaagctgtggataactcagtgtaagatcctgtttattgtctgaggatgctggtgcacaaccttctgtacttgttgcagtggcgaaaattaatagctatatatcaataaattagataatatttatttttcattcatgcctatgtattattttacctgataacactgttcaacttttaagcatataacatgacacaactttttcagccgccgttacccccggccagcgaatctgagctgctcagccgcgcccaatccctggccggagccactttcggtgagctggcggactgtgccggtataccggtgccgccggatctgcgccgcgataaaggctgggtcggcatgctgctggaatactggctgggcgcggatgcgggaagcaaggctgaacaggattttgcccacctcggggtggagctgaaaaccattccggtggatgaatccggcgtgccgctggaaaccacctttgtctgtgtcgccccgctgaccggcaacagcggcgttacctgggcggagtgtcatgtgcgtcataagctctcccgcgtgctgtgggtgccggtggaaggtgcgcgtcatatcccgctggcagagcgccgtgtcggttcaccactgctgtggtcaccgtcggaggaggaggaacgcctgctgcgcgcggactgggaagagctgatggatatgattgtgctggggaaagtggagcagatcaccgcccgtcatggtcaggtaatgcagatccgcccgaaagcagccaacagccgggcactcacagaagctatcggtccgcacgggcaaccgatacaaacactgcccagaggcttttatctgaagaaaaatttcaccgcacctttacttaagcgctatttctggtgctgatcactgttttgggagtttgctcccggtaaatatgaatcgcttcagtcattaatatcggttcgaaaataatgacaacaggagtgttccggatgaaaaaaaccttactgacgctttcacttgcagccgcattactgactcccgccctgcccgcttttgctgatacatcctccgctgatatgacactggaacaggttctggtgatgagccgccacaacctgcgcacgccgattgtgaataccggtattctgaccgaaatcaccgataaaacctggcctgcgtgggatgcgcagagcggttatctgaccaccaaaggcggcgcactggaagtctatatgggccactatttccgcgagtggctggatgagaacaaactgctgccggacaccctgtgcccgaccggtgaaaaagagctgaatgtctacgccaacagccttcagcgcacgattgccaccgcgcagttctttaccgccggtgctttcccgggctgtaccgtcaccgtgaaccaccagccggaaatcggcaccatggatccggtgtttaacccgatcatcaccaatgacagcgcagagtttaaacagactgccctcgctgcaatggagagtcattataaagggctggatctgacaccgggttatcaggcactgaataaggtgctgaatatcaaagactcagaacagtgcaaaaccaacaaactctgttcactggccgacggcaaaaacagctttattattgaagccggcaaagagccgggcgtgaaaggcccgctgaaaatggcaaactctgcggtggatgccatcgacctgcaatattatgaaggtttcccggcagaccaggtcgcctggggcgaagtcaccacgccggagcagtggactgcgctgaataccctgaaaaacggctatcaggaatctctgtttaccccgcgtattatcgcgaaaaacgtggcacatccgctgctgaactatattaatcagcactttgccgccgctgcgccgggcagtgaagcgaaatttaccttcctggccggacatgattccaatatcgcctccctgctctccgccctggaatttaaaccgtatcagttgccggaacagtatgaacatacgccaatcggcggcaaattagtgttccagcgctggacaaataaagcggataataaatcctatgtgaagattgattatatttaccagtcatctgatcagctgcggaataacagttatctgtccttaaaaacaccgccgcaaaaagtcacactggaactgaaaaattgtccggttgataaaaacggctattgcggatgggaaacgttccaaaaagtaatgaaagacagtttatccgaataaacattttatgttcatattcctgcccggcgcacctttgccgggctttttatttctatccctgtcacgcttcggataacactaatagattaaggcactgtaagccgtacctgctgagccgcgaaagtgtcgcgcaacggcagccgcacagtgacccgggatggtttccggtgcaccgtctgacggcacaatggtgaataaagagaccggtgcggaacagttcaggccggataacggtcagatgcgcagaccggatgcacaactggtcgccgggggacagagcggacaaaccgccccgcagggacaacaaagcacaccggtttcctctgatcgtaacgggaaagtgcctccggcacgcccgcaggctgaaaacagccggatgtcatccgtgaaaaaagagataacgtcagcggcagaatccgccatgccgtccgtggatattgatgcaccgtcaatcacggccccggaagtgggcatctccgttccgggaacctccgcgccaacgcttgatatcaaagccccggcagtcagtttaccgggagcggaagtcccggtccctgcactgaaaaatccgttctgatgatctcagccgcacaaaaacccgcccccggcgggttttttaatgcctgaaccgccgcatattctgtgccctgcttcagactgcccatgtaacaatccatcccgtcggtaaacaaatggaacaggcagccgactgccactgcccgtactttccatgacgggatcagcagcagaataagatacacaatcgccgcccacacagtatgcagcggatgaaaaccgacactgcatctgtccgggtcaaagacaggatctgccagcaggtgatccgcatccatcaccatagtggcaatcataatcatcgccgccgctttccagtgctgccgccagaacagccgggcaaacagaaccggcaccagaaaatggcagccgtaatgcaggatattccggaaaatgtcaaatgccacagtaactccgctgacgggttgtccgttatgatgacggctatcatagcggaaataccggaggctatccggcagaaaatggatcagtccgtcacaataataaaatacaccgcattccggataacaaagcgggaattaactggtctgctctgcgggtttatcgctgcattgtcttaagtaaactgagaagatcaggtatattaccccctgattgttggctaccaagaaaaaataactatgattatcaaacctaaaattcgtggttttatctgcactactgctcacccggcgggctgtgaagcccatgttcgtgagcaaatcgcccgtgtgaaatcctgcggcgaactgaaaaacgggcctaaaaaggttctggtgattggtgcatccaccggttacggtctggcttcccgtatcaatgccgctttcggcagcggtgcagcgactatcggtgtattttttgaaaagccgggcagtgaaaacaaaaccggttctgccggctggtacaacgcagccgcttttgataaagccgccaaagaagaaggcctgtatgcaaaaagcattaacggtgatgccttctctgatgaatgccgtcagaacgttattgatttaattaaacaggatctgggtcagatcgatctggttgtttattctctggcatctccggtccgcaaaatgccggaaaccggtgaaattgtccgttccgccctgaaacctatcggcgaaccgtacaaatctgtcgcgctcgataccaacaaagacgtgctgatcgaagctgttgttgaaccggccaatgagcaggaaatcgcagacaccgttaaagtcatgggcggccaggactgggaactgtggatgaatgcattagaggaagccggtgttctggcggataatgcacagtctgttgcctactcctatatcggtaccgatttaacatggccgatttactggcacggtacgctgggcaaagcaaaagaagatttggatcgcgcagcagcagcgatcaatcagaaactgcaggccaaaggcggcgcagcgtatgttgccgttctgaaatctgtcgtgactcaggcctcttccgctattcctgttatgccgttatatatctctatcgtgtttaagatcatgaaagagaaaggtattcacgaaggttgtattgaacagactcagcgcttatttgctactaaactgtttaacggttctgcgccggaaaccgatgaaaaacagcgtctgcgcctggatgactgggaattacgcgatgatgtgcagaacacctgccgtgaaatctggcagcagctgacagatgataatatcaacgacttaaccgactatcagggctataaagcggagttcctccgtttattcggctttggtctggacggcgttgattatgatgctgatttaagcggcgaagttaacttcgacgtgaaagaattagtgtaatcatctctgaaaaacccgccgcagccctgattattcagcggctgcggcgggtttcttatttttccggactgttcagcgggtttcgcagaccagccagtaataatggttattattgaatccgaactcatccagcaccgtcagcccgagcttgcgggtgtgggctgcataagagcgcgggttaaccttgttgataaaggtcaccaggatatcaaaccgctgcgacattttttccagcgcaaaagcaaacagcccttccagcacgccctgcccgcgcagtgatgcatcaatacagaccgggccgtactgatacgagttctctgtggtcagcgtctgaccggcaaactcataatcacccagtttatcaatcatatgggcaaacagcggccacggtgaccagtactgccaggatgccgccatcacaaacgccaccacctttccgtcctgtttggcgacaaataatccctgctcgttttcaatcagatccgtcatctgttcatcactcatctgtgtggtgacaaaaccgtccggcttgtcttcatcactgatggtggtcagatgataacgttttaataaggcttttacctgatccatatccgtcagttcagcaacacaatattccatcgttattctccgttatcattgttattctgcggcgggaggtaccgcaatatccgcaatgcgatcatgaccgatcacactgaaatagtcatccgctgccagagacaccgatctcaccagttcaccggcattaaaaaatacccgtccggcaccggtcagacgcttatcaacatacagcgtcagttcgtcattaaagctgaacggcgggaccgcacccatcgggcagccggtcagtgcctgtgccgtttccggcgcggcaaatgaggctttcttcccgcccgccagtttcgcggcatttttaaaattgactttgcagtctcccggcacaatcgccagcacatagcggatgtccggtgtgctgccggtaacctgtaagaccatcgctttcgccgcctggctcagtttatttcccctgattttacttatcgcatcagaacggccttccgccggatgttcgatcacctcaaaggaaaccgcccgtgaatccagtaaacgggtgattttgtcaaatgttgtcatataaacctcacagtcagccggagaaactcttgcgtcataatttactctcaacgtactcttacagaaacacacagaacccgtaagaatgaggcagaacagatggtacagcttccgcgctaccggcagatggccgatcagataaaacaggctgtccgcgagggcgttttaccgccggacagccgtctgccgtccgtccgtgttctggccgcacagtacaatgtcagcctgaccaccgccctgaaagtgctgcgcacgctggaagatgagcatgttgcggtggcgcggccgaaatccggcttttttgtcgccccggttcagcctgccgctgcggaaagccgcagtacagagacacacaccgccgattttgccccgctggatgaacagacggaactgcatatgtcgatggtcggcgaagagtgccgtgtccggctcgatctggctaacgggcggcgggaactctatccggtcagaaaactgagtcttatcatgcgtcagctcagttacagcaagccgttcctgctgggggattcggtcaaaggcaccggctatgcaccgctgaaagaggaaattgcccgccgtgcagtcagttacggttgccatatcacaccggaaaccctgcttatcaccaacggctgtattgaagccttatcactggcactgcgcgccacgctcagccccggggatgcggtggcagtggaatccccctgttactttgtactgctgcagatgctgcgtaatctcaatctgcggctgaccgaagtggatgcctgtgaaaacggttatgtcgattgcgataaactcaccgccctgttccgccgcaaagcggtaaaagcttttgtgacactcgccaacgtcaataatccgctgggcaaaacgattccggatgaagtcaaagcggagataacccgtcaggcggatgaaaacggtgtgatcattattgaggatgatactttcggtgatgccgcattcggcgggcagcgcccgttcccgatgcgggcattcagtcacaatgtcattctgtgcagcggattttccaaaaccatcgcacccggcgtgcgtatcggctgggttcacagtcagcattacatgcgcaaaatcacctccctcaaatacacctcctcgatgggctctcaggtcctgccgcaggcagctatcagcgaactgctgagcaacggtggctatgatgctcatctgcgccgcctgcgccgtgaactggcggcacaggtgcagaacatccgccgtgttgtgctgcgggaatttccgccgggcaccaccgtgaccgaaccggaaggcggttatgttctgtgggtcaccatgccggaaggcagcctgaatgtgcgggagctgtttctcaatgcacgggcggaggggatcggcattgcgccgggccatatctttgccaccgacaaccgctatgaccgctgtttccggctcaacgccgggttcggctgtgataaggacgtggaggatgcgatcgcccggctggctcagtggtgccgggaatcattacacaccggataacccggggctgactgttctgtttctgcaacagtgaaacccgttttcatgactactccttgatagttcgcgcccttattatctgtttatacataattatcaggagagacatcatgagaaacattatcggcacctaccgcgcaccgaaaggccattgggtcggcgacggatttccggtcagccagatgttttcctacagcaatcacggcaaacatctgaacccgtttattctgctcgaccgtgccggtcctgcggatttcccgccatcagaaggcgccaaccggggagttggtgagcacccgcaccgcggctttgaaaccgtaactatcgtctatgacggcgaggtggctcaccatgactccaccggtcagggcggcgtgatcggtaaaggtgatgtgcagtggatgactgcggcatccggtattctgcatcaggaataccattctgaccgctttatgcgggaaggcggcacgctggatatggtgcagttgtgggtgaatctgcctgcttccgcaaaatccgccgcaccgggttatcagttactgggaaataacgccattccggcagtggcactgccgaatgacgccgggacattacgggtgatcgccggagaatatgccggagcacgcggtccggcccggaccttcacggaaatggatgtgtgggatctgcgcctgaaagccggaaaagtcaccggactggcggcaaaagccagccgcaacgccggactgatcgttctgcacggcagtatttatgtcgacagccgcgcaccactgcacaccggcgagctgatgatcctggacggcactgacagcaccattctgctggaagccaccgaagatgcggttgtcctgttcctcagcggcgagccgattgatgagccggttgtcggttacggcccgtttgtgatgaacagcgagcaggaaatccgcgaagccattgaggatttcaacagcggccgtttcggacatatccccgctgagtaaggcagacgaggcaaatacgattgttatttgcctcacaaaatgaggcgaatagcgtgattatttgcctcattatcttattatcccttattcagacaatagcggctgctgcgcccgccactttcactttccgtcagataaccagactcaaccaagtcagccagatgccgtgttgcactggcgcggctgacttttgctactgacatatactgccggttattaataccgtcagcaaaatcaccgtccagcatccggttcagtactttagcctgctcaggtttcagccggttctgatcaaaccggtgccagtatctgtttttttccagtgtccgcctgatttgcgccagcgttgcgccgacagacacaaccagcattttcacaaaccactccagccacggcgtaatgtccgttccctgccgttgtgtctgctccagcacattataatattctttgcggtgctcattgatggtctgtgacattgcatacaaccgcacagtgctgttttctgcctgagccagtgccagatccataataagacgcccaatccggccattcccgtcttcaaaaggatgaatagtcagaaaccacaaatgggcaatgcctgcccgtaaaacggggtcaataccggcgttatctctgctttcattaaaccaggcgataaatgcgtttatttctgactccacccgttccgccggaggggcctcaaaatgaatgaccggtttatccagcctgccggataccacctgaacagccccggaacggaaacacccgccggttgtccggttaaaaagggtgtcattttcggggaataaccaggtatgccatttcagaaggcgagccgcagaaagcggttcaccgggattattgattgcatccagcgctgactccaccagaccttccgtacgtttgtccgccggataagagacctcctcagaaataccaaggtgattagccagtgatgatctgacagaacgggcatccggtttttccccctcaatatcacttgagtagataatatttgccagaatcgtatccagtgtcttatcttcagcaagctcaagcgctttattactgccgtataaatcaccctgaagaaaagcagcctcccgcagcagcggcaataactgcggtaaatcatacgtaaatccgggccagctatgatgctcccatatccacatactgcctccgatgagtagaataacatcgctattctactcactaactgaggcgaatagaatgattatttgcctcactattcccccgtccccgaaaacgccgccgtctgcggcacacgttccgccagataattcagcagtgcctgcaccgcaggtaacagccctttgcgggacgggaaaaccgcgtggatcacatcctgcgggaactgccagcccggcagaacacggacaagccgtccggcagtcaaatcattgagaaccacaccttccggcagacgggcaatgcccagccctttgcatgccgcgcggtgcagtgtcatgacatcagtggtggcgaggcgtgctgtgaggtgtttggtgatgctgctgccgtcttcgccggtcagtgtcagcgtgtagttttgtttttgttcgctgttggcgaggatcgggaattctgtcagttcgtccggatgctgaggtgccgcttttccggtaaataacagcggtgaagcaaccaggatacgccgcgaatagcccagcactttcatggtcagcccggaatcatccagcgggagggagcgcacccgcagtgcgagatcaaacccttcgctgatcacatccaccggacggttaactgccaggatctgcacatcaatatcggggtatttcaccataaaatctgtcagcagatcctgaagataagcctgtaacagcgcgaccggacaggaaaacttcacgctgccgcgcggatgcccctgtaccgagcagataatctcttcggcgatctccgcctcatcaatcacatttttacactgctggtagaaggtccggccgatctcagtgacatgaaactgccgggtggagcggtagatcagtgaaatattcagcttctgctccaggtcagcaatacggcggctgagccgggatttcggaatacccagcgcctcacccgccggggaaaatccgccgtattctaccactttcacaaaataataaaggtcattcagatcgtatttcatgcctgtcacccgcagcgttatcctgcggatcagtatacataaaaaaatccgccgcattcagcatgcggcggatgtctgtgaatataaacgcaataagttagcggtaaacaataccgccgtcggtcagaatcgcctggccggtgatgtaatccgagtcatcgcttgccaggaaggcaaccagtgccgccacgtcatccggagtctgggcgcggcccagcgcaataccatcgacatattttttgtaggtttcccctttcggtgcgccggtgatttcagagaaacgctcatcaatttccacccacatatccgtgccgacaatccccggacagtaagcattcacggtgatcccgctgctggcaaattctttggccgccgcctgtgtcagtgcacggaccgcaaatttagtggcggaatagacgccgagtaaggcaaaaccatcatgtccggcaatggatgaggcgttaatgattttccctttctgtccgcgtgctttgaatttggccgctgcggcctgaattccccacatcgtgccatcgacgttaatgcggaaaatacgatccatatcctccggcagcacatcttcaatggctttaacctgtgcaataccggcgttattgacgataacatcaaaaccgcccaatgcttgttctgctttatcaacaaccgcaaaaacctgatcgcgctgactgatatctgcggtgaataccgccgctttgcggcccagggcttccacttcttttttgactttcgccagcccttcttctttcagatccaccagcgcgatatccgccccttctttggctaagcgcagtgcaataccacgaccaatcccctgtgcagcgccggtaaccagaaccactttacccgttagtgccatgatgtgctccttatgagtgaggtatttcgttatgatattaatactcatttaaaaacatacgcgtttttacccgggttgcaagccggtaagcacataatgagcaactgtcctgccatgtgacaacacatcgctgtaacaaaattcatcggagtctcattccgtaacattccctgtcctgcataacccacccgccggaaacaaaacaattagtatcatttatatattaataatttcagtgaatgtaacccaaaacgctgttacagactctggtgaagggattcagcttcccgttacaggcggataatccgaaaaaataaatgtaaacgctttcttttgctgtgagatgaatcacacggtcatcacgcactccgggttaagatggcaacatgtttcattacctctgacctgtaatttctgatgacatctatacaccccgtaactatccgtgatgttgcaaaacgcgccggtgtctccgttgccacggtatcccgtgtgctgaacaatacggcggccacccgctcagagacccgggaactggtgatgaacgccgtgactgagctggattaccggccaaacgccaatgcacaggcactggccagccagagcagtgatattctcggcgtggtggtgatggatgtggccgacccgtttttcggcgcgctggtcaaagcggtggacacagtcgcccagcagcacagcaagcatgtgctgatcggcaacggctaccatcaggccgaacaggagcgccatgcgatagaggttctgatccgccagcgctgcaacgcactggtggtgcattccaaagcgctcagtgatgcggaactgagtgattttctccgtcaggtgcccggcatgaccgttattaaccgcgttattcccggttttgagcaccgctgtgtcgggctggataacctgtccggcggggaaatggcgacccgtctgctgatctctcaggggcatcagcgcattggttatctcggctccacccatgagatagaagataataccctgcgttatcagggttatacccgtgccatgaaagccgccggactgacaactggtgcagcctggtatgccgccggttcgccggattctgacggcggtgaggccgccatgatagagctgctgagccgtaatcaggcactctccgctgtgtttgcctataacgatgccatggcggccggcgctatgtcggtgctgaatgaaaacggtatccgcgtgccgcagcagttttccctgatcggctttgatgatattcccgccgcccgtttcaccactccgaagctgaccacagtacgctacccggtggtctccatggccatgctggcgacagaacttgccttagcgggcgccgccggaaccttgccgccgccggagccccatgtgtttatgccaaccctggttatccgtcactcttctgcctaccggtgatatttctctatgtaaacgttttcaatctgtgagtctattcacagacggataacaactctcattttatgatccgggcgtttcctgacgttatcgtcatgtcccaggttctgccatcttcttaccggcatgccgttttatttataaattattattatcatttgccggaagaatgataaacaccgcccctgcctttcctctgaataacaggtggcgtcataaataaaaactgtaccctatcccccgacccggaggcagagaatgaagaagcattttgtcctggcaggcgttgccgccgccatgctgtttggtgctgcggcacaggcacaggctgatacccgtattggtgtgaccatctacaaatacgatgacaactttatgtctatcgttcgtaaagcccttgaaaaagatgcaaaaaattcaccggaaatcacccttctgatgaatgattcacaaaacgaccagtccaaacagaatgatcagattgatgtgttactggccaagggcgttaaagtactggcgatcaacctggttgaccctgccgccgccccggtgatcatcgacaaagcaaaatccaatgatattccggtggtgttcttcaacaaagagccttcccgcaaagccctcgacagctacgacaaagcctggtttgtcggtaccgactccaaagaatccggggttatccagggtgagctgattgccaaacactgggcagccaacccggcgtgggatctgaacaaagacggcaaaattcagtatgtgctgattaaaggtgagccgggtcacccggatgcggaagcccgtaccacctattcggtcaaaaccctgaatgagaaaggcatcccgacagagcagcttcagctcgataccgcaatgtgggataccgcacaggccaaagataaaatggatgcatggctttccggcccgaatgcagacaaaatcgaagtggtcattgccaacaatgacgcgatggcaatgggtgcggttgaagccctgaaagcacacaacaaaaccaatatcccggtctttggtgtggatgccctgccggaagccctctccatggtgaaatccggggcaatggccggtacggtgctgaatgacgcggaaaaccaggcgaaagccaccatggctatcaccaaaaacctggcggaaggcaaaccggcagcggaaggcacaaactacaaaattgagaacaatgttatccgtgtgccgtatgtcggcgtggataaagagaacctgtcacagtttataaaataagcagtgattctttccgcccgcagcatccgtgctgcgggcgtgtccggaacgataacattagccaggtgtatgtatggccgacagctcaggcgaatatctgctggaaatgatgcatatcaataaatcatttcccggcgttaaggcactcgataatgtcaatttacgggtacgaccgcactccgttcatgccctgatgggcgaaaacggtgccggtaaatccacattattaaaatgccttttcgggatttataaaaaagacagcggcagcatcctgtttcagggacaggaaatcgattttaaaggctcaaaagaggcactggaacacggcgtgtccatggtgcatcaggagctgaacctggtgcttcagcgctcggtgatggacaacatgtggctgggacggtatcccgccaaaggtttttttgtcgatcagaacaagatgctgaaagacacccaggccatctttgatgagctggatatcgatatcgatccgcgggaaaaagtccgcaatctgtccgtctcgcaaatgcagatgatcgaaatcgccaaggcgttttcctataacgcaaaaattgtgatcatggatgagccgacctcctccctgaccgaaaaagaagtcaatcatctgtttaccattatccgcaagctgaaagatcgcggctgcggcatcgtctatatctcccacaaaatggaagaaattttccgtctctgtgatgagataaccattctgcgtgacggccagtggatctccacacagcccctcgaagggctgacgatggataatattattgccgccatggtcgggcgcacactcagccagcgtttcccggaaaaacagagcacgccgggagatgtcatgctggaagtcagaaacctgacgtctctgcgccagccgtctatccgcgatatcagtttcgatctgcatcagggggaaatcctcggtatcgccggtctggtcggtgccaagcggacggatattctcgaaaccctgttcgggatccgcgagaaatcctccggcaccatcacgctgagggggaaaaccattaagaacaacagtgcgaatgaagccattaatcacggtttcgcactggtcaccgaagagcgccgcgccacgggaatctatgcctggttaaatatcagctttaactcgctgatttcaaacatgggcaaatataaaaataaactgggtctgctggataacagcaaaatgaaaagtgatacccagtgggtgattgatgccatgcgggtgaaaacccccggccatcacacccagataggctcgctgtccggcggaaatcagcagaaggtaattatcggccgctggctgctgacacaaccggaagtgttaatgctggatgaaccgacgcggggtattgatgtcggggcaaaatttgagatttatcagctgattactgaactggccaaaaaaggaaaagggatcattatcgtttcctccgaaatgccggaactgctggggatcacagaccggattctggtgatgagcaacggtgaggtcgccggtatcgtcaacacccgggacacctcgcagagtgagattctacgtctcgcctcccttcacctttaaggatattaacaatgagcgcagcattaaataaaaaaagcttcctgtcctatctgaaggacggggggatttatgtggttctgctggtcttactggcgattattatcattcaggatccgacattcctcagcctgatgaacctgagtaatatcctcacccaatcctcggtgcggattattatcgcgctgggtgtcgcggggctgattgtcacccagggtacggatttatccgccgggcgccaggtcgggctggcggcggtgattgcggcgacattgctgcaatccatggaaaacgtgaacaaagttttcccgcagatggaaacctggtctattccgatggtgatcctgctggtgtgtgcggtcggagcagttatcggtctggttaacggcctgattattgcctatctcaatgtcacgccgtttattaccacactcggtaccatgatcatcgtctacggtatcaactccctgtattacgactctgtcggtgcttcaccggtagcggggtttgatccgaaattctctgaatttgcccagggatttatccgtttcggtgattttaagctgtcatatattacgttctatgccgcgatagccgtcttttttgtctggatcctgtggaataaaacccgcttcggcaaaaacatttttgccatcggcggtaacccggaagcggctaaagtgtccggcgtgaatgtcggcctgaacctgattatgatttacgccttatccggcgtgttctatgccttcggcgggttgctggaagccggacgtatcggcagtgcaaccaacaacctcggctttatgtatgagctggatgccatcgcggcctgtgtggtgggcggcgtgtccttctccggcggggtcgggactgtgctgggtgtggtgaccggggtgctgatttttaccctgataaactacggcctgacctatatcggcatcaacccgtactggcagtatattatcaagggcagcatcattatttttgccgtcgcgctggattcactgaaatacgcgaagaaaaaataatttcactgaaatgcaaaaagacccgcagtgcgggtcttttgttttaacggtggtgaaaccggtttcagccttttttcgcggcctggagatagagcatttccagtgcgatagttgcgccggccagtgccgtgatatcggactgatcatacgccggtgccacttccaccagatccatgccgacgatattgagcggctgaaggccgcgcagcagtttcagcgcacgatctgttgtcagcccgccgataaccggtgtgccggtgcccggggcaaatgccgggtccagacagtcgatatcgaaggtcagataaaccggcatatcaccgacaatcgctttcacctgagcaatcacatcatccacggtgcggtcattgacctgcgccgcatcgatcacggtgaaaccgttatctgtttcatgctcggtacggataccaatctgcacggaatgcgccgggtcaatcagtccctcattcggggcgtgatagaacatggtgccgtggtcaaacttgctgccgttgccgtaagtgtcggtatgggcatcgaaatgcaccagcgccatcttaccgaaatgtttggcatgcgcgcgcagcagcggcagcgtcacaaagtgatcgcccccgaaagagagacattttttaccggacgccagcactttttctgtgtgcgcctgtaacttatcactcatgtcctgtgcatcaccgaacgcgaacaccagatcaccgcaatccaccacattcaggcgctcgcgcatatcgaatgtccacggccagcggttaccttcccaggccagattggttgaaatctgacggatggctgccggtccgtgacgggaaccggcacggccggaggtcgccatatcaaacggaacaccggtgatcacccagtcagcgtcactggtgtacggctggaaattcagcggcaggcggagaaaaccaaacgcattagagaccagtgagttatcggtctgattacctaatgtgctgttaatcataatgattcctttattaatgtcttactgacacaaagccggacgtattatcccgccgggtattattcatcttctaaataggtataaccgtacaggccgctctcgaactcttcggtaaaggccttttgctcctcttcatccagatcagagattttcacctgatcacggaagcgttcgagcagaattttcggatccagcttcacatactgaagcatatccgccacggaatcgccctcttcactttccagatagcgcacctgaccgttttcgccgacatacacatccagtgcagcggtatcgccgaacaggttatgcatattgccgaggatttcctggtaagcaccaatcatgaaaaagcccatcatcggcggattttccgggtcataagatggcatcggcatggtggtcgccaccccgtcaccatccacatagtggtcgataataccgtcggagtcacaggtgatatccagcagcaccgcgcggcgatccagcggcttatccagcccttcaatcggcagtaccgggaacagctgatcaatcccccacgcatccggcagtgactggaacagcgagaaattcacatagaatttatccgccatgcgttcctgcagttcatcgataatcggacggtgtgcgcggttacccggatcgagatcctgctggatacggcggcagatattcagatacagcccttctgcccaggcgcgttcagtcagggacagcatgccctgcgcgtactgggtgtgaatatcatgcaggtcgagctggctgtcgtgcagccattcgcgcagagagcgggtattgcccttgctctgcatctcttcccaggtttcccacaggctggcaaccggacgcggtgcgtcttcggcaggcgccgccaccggggagaactcgttgcgctccacaccgatcacattggataccagtacggtatggtgcgccgtcagggcgcggccggattcggtaataactgtcgggtgcggcaggccgtgctcttcacaggcatcgccgatagcccagatcacattattggcatactcattcagcccgtagttcacagagcagtcagactgcgaacgggtaccttcataatccaccccgaggccgccgccgacatcaaagcactgaatattgacacccagctgatgcagttcaacataaaaacgggcggattcacggacaccggtcgcgatatcgcggatattcgccatctgcgaaccgaggtggaaatgcagcagctgcaggctctccaggctgtcagcctgacgcagcatatcaatcagctgcagtacctgggtggccgccagaccgaacttggatttctcgccgccgctggcctgccatttaccggatccctgagacgccagacgcgcccgcacgcccaggcgcggtaccacatccagatttttggcttcttcaagcaccacggcgatttcagacattttttcaatcacaagatacactttgtgaccgagtttctcgcccatcagggcaagacggatatactcgcggtctttatagccgttgcagacgatcacactgcgggtcataccggcgtgcgccagtaccgccatcagctctgctttggaaccggcttccagtcccagcggctccccggcattgaccagggtttcaatcacgcgccgctgctggttgaccttaatcgggtaaaccagaaaataatcacctttgtaaccataggattcgcgggcacggcggaacgcggcattaatcgaacgcagacgatgctgcaaaatctgcggaaagcagaataatgcaggcagacggatgtgctcccgctctttctgcacacggttaaccagctcagccagatcaacggcggcctgcggcatctccggattcgggcagacggtgacatgaccgaggtcattcacaccgtaatagctgccgccccagtatgcgatgttataggtctgctgcatcttcagcgcgatattatcattcattagtcatctcctgattctggagtgaaacttacctgtatggctgacatacgcctatcccccttcaccgtgggataaatctgtcctgttgacaagtaaaaattcaaaatggattacatcatccggcaaaaaccggacacagatttacgggcttaccgcagagtgacccgcctgcttgcgttatccggtctgtttgagtgtaacggatacggaaaacaccgtgcagagcacgtgtcagtcagagaggaagagagaacagaaaaagacgcggacacatgctgtaaagcacgtggctgttgaacgtcaacaagcagcagataatggttcattaacccatttacccccacacaggattacacaccgtaacccccgcctgaatcatacagaaaacctgagtttctgccgtttataactgaagaaaaattcacagctactggccgcagtttataccggttatgacacaaaaatgcaaaatcaaaatgacggataagtgtaaaaaataaaaacagtcacgtaacacattctgaaaagtgaaaaaaaccagcggaaaaaccggaggcactataaaatttctggaaccactgccgattatacattagaatagccgtctagaagttaatacatccatcaatgtaccgaaagttcacttcacttaaggtagagaaaaataatgactacacatcttttcacttctgagtccgtatctgaaggacacccggataaaattgccgaccaaatttcggatgcagtccttgatgcgattttagaacaagatcccaaagcgcgtgttgcctgcgaaacctatgtcaaaaccggtatggttctggtcggcggtgaaatcaccaccagggcatgggttgatattgaggaaatcacgcgccgtactgtccgtgagattggctataccagctcatccatgggcttcgatgctgattcctgtgcggtaatcagtgctatcggcaaacaatctgccgacatcaaccagggcgttgaccgcgctgacccgcttgagcagggtgccggtgaccagggtctgatgtttggttatgcctcaaacgaaactgacgtgctgatgccggcaccaatcacctatgctcaccgtctggtcgagcgtcaggctcaggtacgtaaaagcggtacgctgccgtggctgcgtccggatgcgaaaagccagatcaccttccgttacgatgacaacaaaatcgccgggattgatgcggttgtgctgtcaacccagcattctgaagatatctcacagaaagatctgcatgaagcggtgatggaagagatcatcaaaccggttctgccggttgagtggctggatccgaccaccaaatatttcatcaacccgaccggccgttttgttatcggcggaccaatgggtgactgcggtctgaccggccgtaaaatcatcgtcgatacctacggcggcatggcacgtcacggcggcggcgcattctccggtaaggatccgtcaaaagttgaccgttccgcagcctatgcggcccgttatgtggcaaaaaatattgtcgctgccggtcttgctgaccgctgtgaaatccaggtctcctacgcaattggcgtggcagagccgacgtccattatggtagaaaccttcggtaccggtaaagtttccaaccagcaactgacgctgctggtgcgcgagttcttcgacctgcgtccgtacggtctgattcagatgctggatctgctgcacccgatttatcaggaaaccgcagcatacggtcacttcgggcgtcctcagttcccgtgggaaaaaaccgacaaagcagagcagctgcgcgaagccgctggtctgaaataattccctgttatattaacaggcacaaaaaaccggcttttcagccggtttttttatgttctgaatccgtaaatacattatgatttactgcactgccgtgatgaatacagtgcaaaaatcaccatcccggcaatcattgacgcagtaaataccagccctttgatactgagcatcccggataaaacaatccccggtcccgggcagatccccgccagcccccagccgataccaaacagcagtgcgccggtcagcagccgtttatcaattttactgttcgccggtaactcaagcggcgtgccgcatacggtctttttacgttttttagccaccgtaaaggcaaccatactgaccgccatcgccaccgccatggtgatcagcagagaaggatcccagttgccggtaatatccagaaacgccagaattttctgcggattacccatcccggccaccagcaaaccgaggccgaacaaaatcccgctgattaatgcagtgataacaggcatagcgtatccttatttcatcagccagacagtcagaaaagcactgaccataaacaccgccacggcagcaaatgatcgttttgataaccgcgccataccgcagataccgtgtccgctggtacagccgttacccagccgcgtgccgaaaccgaccagcagaccggccgcaatcagcagcggataatccgcagcgatcaccacatccggctgaccggcaaacaacctgtaaacccacggtgcccctgccagcccggcaataaacgctatccgccagccgctctgctttgtgaacatattggcgaagatcccgctgatcccggcaatccgcccgttaaacagtaacagtacagcaaccgcaatgccgatcatcagtccgcccagtgccgcactgaccggcgtaaaagccgcgctatcaataatcatattattttccttgtttttcaggacaataaagctgatacagcgtggtgagcaatatcaggactttttcatctgccacggaataatagatacgttttccctcacgccgggtgtgcaccagtccttcattgcgcagaaccgtcagttgctgtgacagcgtcggctgattgatgccggtccgctcctccagttcgctgacattgcattccccctgactcagctgacagagcagcagcagacgatccggattccccagtgttttcagcagggcagcaacgccggtggcggcttcctgcatatcggtaagcagtgttggtgtcatgaatttattccttacgacattatataattaaatataatattattttgcaatatatacaacatgctgataacggttgcagctttacgtcagtatcgctaagcttccggctatgaaaccgacccgagtccccaccgcattacagcaggcctgcatgcagaccctgcgtgattatctggcccgcgcctgccgggtgctgaagacggattatccggagcctgaactgaactatcgtcagcgcggcaccaccgccggcagcgcctgcctgcaaacatgggaaatccgcctcaatccggtgttactgaccgaaaacggccccggatttatacaggatgtggttccccacgagctggcgcatctgctggtttaccgccgtttcggacgcgtggcgcctcacgggcgggaatggcagtggatgatgacagaggtgctgggtgttccggccgtccgtacacaccgctttgatgtgacgtctgtccgcgcccggacattcacttaccgctgccaatgcaaaacggcacatgaactgactgtccgccgccataacaaagtgttgcgcggggaaagtcagtacctgtgccgtcactgtaaaagtacgctggtgtgggataacagtgcagctgcaatatcatccccgtgcgaccttacaccagatcagtcataatcagtttggccatctcgaagtagataatcagcccggtgccgtcaatcagtgtggcaataaacggcgcggaaaccactgccggatccactttcagacgcttgagcaccatcgggataatggaagacaccaccgcactccagactgtgatacacaccagtgtcagactgaccaccatcatcacttccggcccgacccccaggaaccaggcacggatcatcccggcacatcccatggtaaaggcgaccagcagtgacgtggacagctctttgcgcagcaccgcgccgatattgcgcaggctcacttccccgagtgccatggcacggacgagggttgaggtgatctgagtaccgctgttaccgccggtgccgatcagcagcgggataaagaaagccagcgagatagcggcttccagctgctcctcgaatgccttgagcaccgtaccggtataggcttccgccacaaacagcatcagcagccagactgcgcgcttacgccacagcgtgaacggactggtgctcagataaggctcatccagcggctgggagccgccctgtaatgccgcatcctgggtgttttcatcctcaatcagctccgcgatatcctgcggacgcagaataccggccagcttgccgaactgcaccaccggcacagtatcaatcccgctgttgttgataagctcatacacgtcgtgccgggactgctccggtgacaccgaaaaatacgtctggcgcataacatcggcgacaaacatatcttccgctgcggtcagcagggctttgaccggcaggataccattcaggtaattatcctcatccagtacatataaataagtggggatctgctcaccttccagttcctcacgcagggtgcgtttgacggcagcaatcgtgtctgacacggtcacgcggatatacgcctgactcatgtaagcactgactgcgtcttcatcattacgctgcggacgatcggtatggtgtggcggattaacggatggcgcggaaatgaccagcgcgtccgctttttcgtagttggttaacttcatgatgtgtgaccctaatgtctgttatggacttcaaacagcactccaataggggcgaaaccagatgagagaatgcgtaggctatctcacgtctcggttttagcactatacaacgtatcccgcagactgcgggaagttacttcgggttataccttctgttcgatataacctgtcctaatcttgggcgtctctcgacgtcgtcagatcagcaacctttgtttgtataggagcctcgcctaacgagatactgcaccttaaatgcggcgcgaattataactctcagaaattatatggcgaggactattactatttcgtttagaaaccattgaggttacaaatcaggtccgggaacccagatcattatcgctctcatcaccggtcagctgccgtgtcacttcctcacagcggacaattttaccgtctgccagacggaaacaggcgaaaacctcaaaggcggcatgctcaccactgactttttctgccttagcgatatgctgagtgtgcacacaggacccgccttcagcgatggatttaatctcaatggtaatactgcgggttgccattttcagggcattaagatgggcaagaaatgcggggaattcaattgtctgaccattcaccacctgaacataatcacgggaaaaatactgttcaaccagggattcatcaccgatatgttcaccgagaacgtcagtcagggcgcgggctacaaactctgtcttattcattgctgaaaatccttttttattatgatcacatttacagcatagcggaaacccggcgtttatccgccggaaacagaaaaagcgccgctgaaaacggcgcttttttgcaattatacagaatgattctcaatcaggctaattcaacattgccctgaatctgacagctgcacgccagaacataaccctgttcaatctcttccggggtcagcgtcatggtgctggtggtggtgtattcaccgctgcggacgcgggttttacagctgccgcagacaccggcgcggcatgccgccatcaccggcacactgttcgcttccatcgccgccagcagggtcataccgacaggcactttcacctgacgcagcggggactgaatggtcatggtgaccatctgctctccggcttctgcttccggctccggcccgaaacgctccataaagaagctgcccggatccacattcagcgcctgacagaatgtctgcacattcttcatatacggcgccggaccacaggtcatcaccgtatgctgtgcgatatccgggatcagtgctttcagtttttcttctgacaggcggccggataacaattcatccgtctcatcactgttttccaccatcaggatcaggcgcagacgggccgggaatgcagtcagcaactgctgccattcctgagcaaaaatcacctgctgtttatcacgcacgttgaaaatcaccgtcacctgactttccggctgacggtgcaggatccagcgggtcatcgacatcaccggtgtcacgccgcaaccggcggccagcatcagatagcgctctgccgggcgggcatcacaggtaaattcaccctgtgcatcagacagccacaggtaatcacccggtttcacctcgccggtcagccagccggaaccctgtccgtcatccagacggcgcaccgtcaggctcaggaacgggctcagtcccggtgtggaggataaggtataagcacgcagtgtctcatcactgttgcggatactcaccagcgcatactgccctgcgtgatactgataaaaatcgtggttaatcagattgatagtccacacatccggggtttcctgcctgacagaatggacctgcatgcggttcggacataaagacgtcggcattgtcatcgggctctcctgactccgtgccggagaaggcgtgaccgccctctccggtgctaacagttacagcaattacgcgcctaacacagcgtgtaaatcattttcaacagtggtaatcggacgcataccgaatttttcattcagtacattcagcagattgtcagtcaggaatgccggagcagtcgggccggtgaagatatccttcacacccagcgccagcagggtcagcagaatcacaatcgctttctgttcaaaccaggagagcaccagtgtcagcggcagatcattgacgccgcagcccagtttctcagccagtttcaccgccagcataatcgcggagtacgcatcgttgcactgaccgacatcaagcaggcgcggtaatccttccagggtaccgaaatccagtttgttgaaacggtatttaccgcaggccagagtcataatcaggcagtcctgaggaacctgacgggcgaaatcggtgtagtagctgcgttcaccgcggctgccgtcgcatccgccgacgaggaacacatgacgcagtttgccggtcgccaccaggtcaatcactgtatcggcggcattgagcagcgtttcacggccgaaaccgacggtgatcaggtgctcgatttcgctgtacgggaagccgtccatcgcctgagcctgcgcaataatatcgctgaaatcatcaccggtcaggtgtttcgcgcccggccagccgacaatactgcgggtccagatacggtcggtataactgcccggattcggatccagaatacagttggaggtcatcagaatcgggcccgggaatttggcaaactcagtctgctggttctgccagccgctgccgtagttaccgaccagatgcttgtattttttcagttccggatagccgtgtgcaggcagcatttcaccgtgagtgtaaatgttcacaccggtgccttctgtctgttgcagcagcatatgcagatctttgaggtcatgaccggagatcagaatcgctttacctgccaccggacggacgttcacggaagacggcgtcgggtgaccgtaagcttcggtttcaccggcatccagcatttccatgattttaaagttcatcataccaatcgccatggactggttgagcagctcacccatatcagacggatcagtaccgagccacgccatgatttcatggtactggccgtaaatttcatcgctgtatttgcccagcacatgggcgtgctccatatatgccgccgcccctttcaggccgtacaggcagagcatacgcagaccgtggatatcatcaccgatagcctgcttatctttattcagggcaaattcatccgcctgtttcaccagtgacgcaatatccgtgcccttcagttgcaggtttgctaacgggtgattcagaaccagtgccgggtttttcgccaggcagcgtttcatcaggctgtcacgcatcacaatcgcttcctgcgcataaccgatgatgcgctcagaatcgaagttaacgttagttaatgtggagaaaaatgcacgcggcgcaaagctgtctgtgtcgtgatcgatgatacctgattcacgcgcagcaaccgcccacgctgaaagactttccagtactgccaccagcagatcctgtaagtcagatgtttctgcggttttaccgcacatgccctgggcataggcacagccattacccaccggtgtacgcatcgtttgttcacattgcacacagtacatgctcttgcttccttataagttgtattttatatgcaacataagaatacgccatttcagaccggtgaaaaggggttttcctgactatcattcctttgcttgatctaaagcaaaaattaaccggcacgacacatcactatcgcgaatgattaacatttacattatttacagatgcaatatggagtaaggaattatccggtattttggggtaaggtggcgtgatataaaccggtaaggcaactgaccagaagatggataaatgcacttgcatccagatgtggaacgaaagaataaaacaggcggattaatccataaaaccgccctttccccgctaaaacagcaagatcacattcacaccaaaaataattctcacgactatcatttaacccccgaatttcgaaccaaaaaatcagcatattagtaactttccgttaaaaaattattgcgcacaggtaatagttattattatcatttgtcttcttaaattctcacggaaaactgagtgatgactgattcctgtaacgcatcctgccgccctgcccgcctcacgccgctggcactggcgctcgctgttatcagcggtggcagtatcgccgccaccgcagataccgaagacccggttgtggttgtcggcaactggctggataacactgataacagcgatacgctgctgaaccacggcggcgcacggaccatcaaaaccaaaaaacaaatcgatgagtcaggggcggaaaccatagcggacgccctgcgtggtattccgggtgttcaggtgcgggacagtaacggtaccggcggcagtgacgtttcactcaatgtcggtatccgcgggcttccggcacggttgtccccgcgctctaccattctgctcgacggtattccgctggccgctgccccctacgggcagccgcagttatcgatgtcaccactctcattaggctcaatcagcagcattgatgtgatgcgtggtgccacctctgtccgctacggaccgcaaaacgtcggcggcgtgattaactttgtcactaaacctattccggaaaccttcagcggttccgcgtccgtcaaaacacagggtgcacgcaccggcgggctgaaaaccctgaccgatgcctctgtcggtggctcaaaagaagacggttctgcaggtgcgctgctgctctactccggtctgcacggccagggctaccgcaagaataatgacaataccgatattgatgacatcatcctgaaaacccgctatgccttcagtgacactgatgagttgctggcaaactttcactattaccatgcgcaatccgggatgccgggcggcctgacagaggcacagtacaaagccgatccttaccagtctgtccgtccgtttgaccgttttgaaggcaaccgtcaggatatgtcctttaaataccgccaccaggaagatgataaacagtttgaattactgacctggttcagcaaaagttaccggggcagttatattgaaagtgagggaacaaatgcgagtgccggtaagagccgccttgtttcctatccgcgtcactacacagcttacgccattgaaccgagctattcacagctgttccgctttgataaccagtcccacgaaatcaccctgggttaccgctatctgaatgaaacggcggatgaaaaagcctaccgctccggctggtatccgaccggttctcaaagctcacgccctcagaccgacagctactatcagcacacctccggcggtacagaggcccatgccatctatatcgatgacaccattaatgttggtaactggacggttattcccggcctgcgttatgaaaatataaaaattcatctcgatgacggtttccgtaaccagttccgcagcaagagctacagcgaaccgttaccggcactgtcggtgatttatcatattgatgatcagtggaaactgttcgccaacgccggcagctcattcggcagcctgcaatatttccagctcaataccggcggcgcgggtaatgatccggcaaacggcctgagtgcagaaaaagcccataactatgaagccggtacacggtttgatgatggtctgctgtctgcggaaatgaccctgttctatatcgatttcaatgatcagctgcaatacattgaaaactcgaccggctggaccaacctcggtgcgaccacccatcagggggtagaactggcactgaattatgacctgagtgaaaccgcgaaatggctcgacggcgtcagtatctacagcacttatacctacacaaaagcagtgagcaaacgcggtaattttgcggataaagatctgccgttctactcccgccagctctttactgccggtgcccgctatgaaaccggaaactgggtgtggaatctcaacacctatgcgcagtcaaaacagcagtcaccgggaaccgggaaaaattacattaccgaaggcagtgctgacgggcgttacggcattattccgggctatatgatgtgggatgcgcgtgcggagtatcatttcggcccgcaatggtcagatctgacacttgccgccggggtgaaaaacctgtttgatcaggccagctttacccgttcaacagataataactacggcatttacgccgggcagccgcgcaccttctttgcgcaggcttccgtgaagttttaaaggtcattcatataatgaaacgcatattccacgctgccggacgttttccggcccttatcatcaccctttgtgccgcactcgcggcactgtttccgctcaatgcaacagcggaactgataacggtgacggatattgccgggcggacagtcaccgtcaatgccccggtatcccgtatcatgctggcagacagccgggtactggttgcgctgaatattctgcatccgtctgaaccgctgaaaggtattgcggcatgggatgatgcactgaccaaaaaagcgccggacctgcgtattgcttatgaaaaacaatttccgcagctgaaagatattccggtatttccgaacccttacacatcggatttcagtgtcgaaaaagcgctgacttatcagccggatttggtgatttttgataccggactgcaaagtaaactgaccgaaagcggcaccctggatttgctggagaaaagcggtattccggtgatatttatcgatttccgtcagtatccgctgcaaaacaccatgccaagcatgacgcttttggggcaggtcttcgggcaggaaaaacaggcggcagcatttaatgatttttaccgcgagcggctggatcttatccgctcgcgggttgcaaatattccggaagacaaaaagcctaccgtctttattgaacgagcggcgggtcttgccggggaaaacagctgttgtaaaacctttggtaacggtaacttcggggagtttgttgccgctgcgggaggtcataacctcggtgcagactggtttaaaaacggtatgggcggtgaggtgagtgaagaacagattattgccgctgacccgcagttttatctgatgaccgtcgccgactgggaaaatacccgcaaaggcagtgcttcagtaccgctcggctataccggctctgaggagcgggctgtaccggcactggaaaaactgatggcacggccgaaactgcagtatctcacggcgtatcagcagaaacaggtactggcactgtatcagcaatactatgacaccccgttcaatattattgcggtggaagctatcgccaaaatgctgcatccggcactgtttcccgggctcgatccgcaggcggacagcctgatgctgcataaaacctttaccgctctggacggcagcggcctgttctggctgcaaccctgataatcacatcagttgctgcaaccggaaactaacgggcagttttctgcccgttagttacatttccggccactatttcttctgatataactcattcgccatatcaatactgtccgcattaacatcccggatgtggtcacgcgtcagacgatataccaccgggcttaataagatcagtgcgatcaggttcgggatcgccatcatggcattcagggtatccgccagcagccagacaaactccagagactgtgtggcgccaatcggtagtgctatcagccacagcacacggaaaaccttaatcgccttcacgccgaacagatactggacgcacttctcaccgtaaaaactccagccgaggattgtagtgaaggcaaaaatcgtcagtgcaatcgccacaatatagtttccgcccggaatcgccgctttgaaagaggaagcggtcagtgtggcaccggtttccgctgtcagccagccgcccataatgacaatggtcaggccggttaccgagcagacaataatggtgtcaataaaggtaccgagcatggcgatcagcccctgacggatcgggttctgggttttcgcggcagcatgcgctatcggtgcactgcccagacccgcctcgttggagaatacgccgcgcgccaccccgaaacggatagccgcccagacggtcgccccggcaaacccgccctgtgccgccaccggtgtaaaggcagaagtaataatgagggaaaacgccgccggaatttcactgatattcagcgcgagcaccacaagaccggcaccaaagtagccgacggtcataaacggtaccagtttaccggccacgtctgagatacggcggatcccgccaatcagtaccgcaccgaccagcagcaccagcgccacgctggtcacccatttgttgatgccgaagttactctccagcacatcagccacggagttggcctgaaccgtgttcccgataccgaacccggcacaggcaccaaataccgcaaacagtgttcccagccagacccatttcgggccgaggccgtttttgatgtaatacatcgggccgccgacatactgcccgtatttatccacttcacgataacgaaccgccagcacggcttctgagtattttgtcgccatacccaccagtgccgtcatccacatccagaacagcgcccccggcccgcccatcaccactgctgttgccacaccggcaatattgccggtgccgatagtggcggataatgccgtcatcagggcgttaaacggggagatctgcccttccccgcgtgattcattgcgctgaaataataatctgaacccggttcccagtttacgaatcggcaaaaaaaccagccgaatctgcatatataagccaacacccagtattcccaccagcatcggcacaccccataccacgccgttcagcgcgcccagccactctgttatcaaatccattcacccctcctgaccggccctgttacttttttattttacgcgtcacatataaataacatttatttatcatttattaataaagcggaaaaatgccgggaatgcgaacaaaaaatgtccggatttgcgttggatttttgaatctgtgaagggtgtcacttgtcacaaattgaattaaaatagtgattaatttttatttagaatggatcatgttcagccatgtcagatgctttaccgcatacgacagccacgcttaaacgccgttatcgtgtgctcaaacgccttaaagaacgcaatctcgcccctgttactgtcctgctgctggcggctgccgtcggcgcactcgccggttttaccggtgtgctgtttgaacgcggggtcaattgggttggtgaataccgggtcagctctctgtcttcactgacagataataaagaaatacttatcccgctgatgttcattgtttccgccctgctggccatgtcaggttactggctggtgcgccgtttttcaccggaatccggcgggtcggggatcccggaaattgaaggggcattgcaggatgtccgcccggtacgctggtggcgggtgctgccggtaaaatttatcggcgggctgggtactctcggctccggtatggtgctggggcgtgaaggcccgaccgtgcagttaggggcaaatatcagcgggctggtcagtgcgctggccggggtgaaaaaccaggaatcccgccacacattgctggccaccggtgccgccgccggtctgaccgccgcctttaacgcaccgctcgcagggatcctgtttatcattgaggaaatgcgtccgcagttccgttacagcctgatttccatcaaagccgtttttatcggcgtaatcatgtcgagcattgtttttcagacctttaacagcggcgcgccgattctggatatcggtaaataccatgccgccccgctgaatactctctggctctatctggtgctgggaatggttttcggtgtgattggtgtgatgtttaaccgctttctgctcaccatgcagacacagttccgccgtttttatcaggataaaacatcccgttttgttgccaccggcggtctgattggcgggttatgcggcattgccgggctgtactggccgcaggtaaccggcggcggattcgcggtgatcccggatgtcgctgcgctgcactactccctgaccggtattctgatgatcttcctgttccgtgtgctcaccacggttatctgcttcagttccggtgcgccgggcgggatcttcgcgccgacactcgcactcggcacactattcggcagtttcttcggctatgccgccatgctgctgtttccgcagtatcagattgaaccggcgacctttgccattgcaggcatgggggctctctttgccgccaccgtccgtgcgccgcttaccggtattgtgctggtgctggagatgaccgataactatcagctgatcctgccgatgattatcacatgtctgggggcaacactgctggcgcagtatctgggcggacgtccgctgtattcggtactgctggagcggatcctgatgcagaacggcacgccgccggaaaaaaccggtgacgcgccgcgagggtaatattaatcaggcttttttgcgggcaatcagggtggcaaaatttaatcggatccggttgcctgccgcatcagtgcggtgcagatgtcccgggttttcgttgtatttcagaatgtcccagtccgcataatagccggataactcgcccggtttcaggaagcagtcaaacggcagttcatcatacggcatattctctgtttccaccgggcagacaatcaggttatacccgtcctggcgggtatgtgcctgcatatcggcgatgatcgcagcaatattctctcttttcaggaacatcagcaccacggtggaaataatgacgtcgtaatcatcctgtaatgcatgctggttgatgtcatacacctgcgtgcggatattgctgatccccgcagcggctttcacatcctcgatcgcctgaatgtgctgcggattgatatccatggccgtcacatcataaccgagctgcgccaggaaaaagctgttgcgcccgcgtccggagcctaaatcgagtgttttacccggttttgtcattgtcaccagttcacggacttcggagtgcggacgggtcagtccgtggattttatagaattcatcttcaggctgacaccagaaggcaagctgacaggaaatatcatcactgacggattcaattttgtgccacacctgcgggtcaagacgcggcggctgatgcgtggtatcaaagtggtagcgggtctcttcgccgttttcaccgaaaacgacaaaatccatctcccccgccagaaccgtcagctgcgcccacgtaccttccgccgtattatggcgatccgtaaaggccatcgggatagtggttttttgccagaccggcagggttttatagcagactaagttttccattttacgcctcaccttaaagatgcattttaaatacatcttatatcctttccggtgaggcgtaaatgacttttatttctgacgggcgataacttcgtttatcccctgaaagacaaacggtttagcatcggtgaaatcctttgccacatcaccggaataaatgttttgctgttcaggacccaaatccagtttcttcactttgccgttttctttgctgaaatccacttttttcaggtcaacccagaagatattgggtgtcagcgccgattcaaagaaataaatctgacgtttgtgatccaccaccgtacgccagcgggtggaggagatattcggctcttcttcggtattcagcccgaacggcacagacacattgcggatcacactgaatacagacgccaccgctttattcggcgtggtcgctttcggaatcgcattaatatagaaagacccgcgcgcaaaacggtcagcggagcggttggtgcccggcagcatcacggtgccgttgatttgctgccagtagctgtccagtgccagctgctcgctgaataccggggagttggtcattacctgatatttacggctgtgatgaattacctgtttgccatcaatatattcaataatggcgctgtcaccggaagcatcggataatgaaaggtgcagtgtcgccaggcgctcttcacccgggactttatcagtgatcactgcgaacggctctttttccagtgcagtaaccgcttcttcaacggtcgcgtagttatccagcacatactgtgcccaggcagagatactcagggttggtttgttgctttccggtgtcggatacaccgattccaccagccacagcaggtttgcggacaatcccttttcattaatgccgtcggtggtggaaacatcatagccggatgccaccacactgccgtattttgacacccatttcacggaattcggcccggcggcaccatcgcgttccatcccctgcgggaagatccataaattggtaccgacatcacttttccagtccattgaccgggcagtgatcacctgcgcatcatccccgagatacaccagccgggtgcaggcggaagcaatctgggcagccagtaatgtggccgacgcgaccgcaccggcaagtataattcgcttaaatgtcatgaaaaaccccttttcattgcgtccggcaaccggcagcttaccggttacgcttccttattactgtagtccttatcaggattttgtggcaaacggcggccgggcaaaccagataagaacaatcaatccgatgaagacgccgccggagagccagaaaatctcattggcactgataatcagcccctgggcggtaatttccttcgccagataggcggaggtctgcgcttctgataacccgtgctgcgccatctcctgatacatctgtaccgattccggattatacgcggtgatggattccgtaagctgagaatgatgtaacgattcgcgacggctccacagcgtggtggtgatcgatgtaccgatagatcccgccagtgtccggaagaaattggccagcgcggaggccgaggccagtttctccggcggcagaccggaaagcgtgatggtggtgagcggcataaagaaacaggccactgcaaaaccctgcaccagctgcggccagaccgaggcatagaaccccatctgtggctcgaaagtataggcgcgccagtagaaacagacggaatacaccacgaaactaaaggttacaatccagcgcaaatccaccacattggagattttaccgacaaacgcggaaatcagtatcggcaccagcccgataggcgccagcgccagccctgcccattcagccgtatagccgtacacctcctggagcagctgcggcagcagtacaattgcgccgaaatagaccatatacgccagactgaccgacagtgtgccgatggtaaagttacgcgacttaaacagcgacaactcgacaatcgggtttttatccgtcagttcccagatcaccaggaagaccagcgcaacggctgcaataatggccagtgcgacaatttcatctgactccagccagccgagatctttccctttatccagcaggatttgcagacagccgatcccgaccaccagcagcgacaagccaatcacattgagcggaacctttgtcaccttcgattccataccgcgcagcagcatcaggctgaccagtaccaccgcaataccgataggtacgttgataaagaaaatccagccccagtggaagttatcactgatatagccgcccataatcggcccgaacaccggcgccagaatgatggtcatcgaccagagtgccagcgcggtattctgtttggcgggcgggtaacttttcagcagcaggctttgtgagagcgggataatcggcccggccaccccgccctgtaacacgcggaagaaaatcagcatttccaggctttctgataacccgcacagcagtgacgtcagggtaaacagcccggtggaccagataaacacccgtacttccccgaaacgcttggccagaaacccggtaatcgcgatggaaatcgcgttggataccccgaatgaggtaataacccaggtgccctgagagacagaagctccgagatcgccggaaatggtcgggatcgccacgttggcaatagtggagtccagcacctgcataaaggtggccatcgacagcgcgatggtcgcccagaccagtttcatgcctgttaatggttgattagccacaataaagccccgcgctgattaactggcgttatcggtaatgatttgtgcaatcaccgcattgaccggtgccagatccgggatcagcacatcactcttaaaggccggggtatcacgctggacattggccagaaccgggccatcggtatttttggtttcgatagtcacgttcatcgataacccgatacgcagcggatatctggcaacctgctgcggatccagctctacccggaccggcagacgctgcaccactttgatccagttcccggtggcattctgcgcaggcagcagagagaaggcactgccggtacccatatccagcccggctaccgtgccgttaaaggtcactttatcgccgtaaaaatcactggtaatggtgaccggctgcccgatacgcacactactgagctgcgtttccttaaagttggcatcaatccagaccggttcgaccggtacaatcgccatcagtgaggcattcgggctgacctgagccccgacctgcacgttgcggcgggagacatacccggtaaacggactgcggatttccgtgcgctgtaagttaatccaggcatcacggactttatccgccgcctgcagcaccgcaggctgatccgccagcgccgtggttttcagcagggctttggtggcattcagttgctgcacagacgcattcagggatgcctgcgcctcttcaaccgcttcccgtgagtgctgtaaatcttctttggagatagtcccccgctgtcctaacacactgcggcgggcatagtcattctgtgcctgattcagcatcacttgtttctgggcgataaccgcaccgagctggtcgcggttaaaatagagttcctgagtctgccgcaccgtggccgcgagatcatgacgggcctgcgcgtaagccagttcagcattagttttatccagcactaccagcacatccccggcatgcaccagatcggtattctcaaaattcacctgtgtcacattaccggtggtttgtgcgacgatcggcacctgaaggcccaccacgtaggcgtcatcggtatattcctgataacgcagcaccatgaaccagtaaataagatagccggcgagcagcacaataaagaggagtgacgttcccgcaagccagatttttcgtctggcgggattggatgacgatgtttttttgtcagaaggctgggcagcagaagactgcgctgatgtgttgtccatcaaaataccccggtaataaagttaagccaaaaatattgcgcacagaatagcctgaatcactataaaagtaacggtaagtgaaatattacaggggaaaaccgaaaacaatataaacagaaacaaaacatctgctgaacacaataaaatatgtaacttatttatcggattatgatgaacagcaaatgaatatagggaaataatcagatatttaagtaatatccgctgcatattttgatacttatttctgcactctcagtgacagagacagaacacataaaaagcgattacggtaaaaatcccctgattattcgtctgcccggttcattttcgggtatcagagtattttctgtttacctttcccgattcttaaacaaagtatcgtgttttactgaaatgtgtttgttttttatccggatacagaaaacagcacgatttgcacatttccgtttctgtccgccggacataaaaaaaccgcagagtcataaacgctgcggttattatccggtacccggagatatttactgagacaaaatcagacgcagcgcctcagcggtagccgctttattcggttctttcgtgaataagtcataaaaatcgccgacaatcagacaggtggtgaccgggtcttccgcgcctttattcaggtcactcagcaacatcactttatcaccgtatttttctgacagtttctgataaacatcccctaataccttataagcttcctgcgccgggacattaccggtattccggtcttccagtgatgatgtcaggatcagattcacggttttcagcatccggatatcggcttcattataggtaaactgcgctttattctgcgggaatttattcagtgccgggaaaaagttattaaagcactgctgtccggacggatcttttaccagataaccttccgcctgctcttttaccgccccggcgaaggcattcagggcatcatcagaggcatacgggatccggtcaattaataacactgccgtcatcccggcgatatcattcatccatgccactttctgctcgcgggtcatggtgtcatagttcctgatattactcttcaggcctttatatttttccggggaaattttgcctaccacttcaacaaactgcatcgattccgacatcatctctgcttcaagtgatttttgtgttgccgctccgtctttactgacggcggtgacagaaaaaacattatcccgcttacccatataataaccggcaccggcaaagaccacggcaacaataagaaccaataataagctgagttttttattcacgcactttcctctgatacgctgagttatcactgaaagtgatagtgacacaaattaataaggcctgctattgcaggccccgataattgttcagattgtaaaaataatcagatttttacgccttcaacggaaataatcagttcagcatcctgagacttcggtcccagatcggctttaatattaaagcttttcagtgagactttccccgttgcctcaaaaccggcgcggtaaccaccccacggatctttgccttcaccggtcagttttgcatccagagtaaccggattggtcacgccgttcagcgtcagatcaccggtgataataaagtcgtcgcctttcttttctactttggttgaaacaaattttgcttccggatttttctctgtattcagaaaatcccctccgcgcagatgtttgtcacgctcagcatggttggtatccaggctgccggttttgatggtcacatccacgttatcctttgccgggtcggccttatcaaaggtaaatgtgccgtcaaaatccttaaatgtcccgtacagccagctgtaacccaggtgctgaatacggaactgcacaaaggcgtgctgcccttctttatctatcttataggtgtcggccattgccgcaccggaacccagcagcatcatacctgcgcttaaaccaaccagtgctttcttcagcatcatattcactccgtcataataaaattacgggcagcccgttcagggtttcatgcccagcatgcgttttaatgtggcgtctttatcaaagaaatgatgtttcagtgccgccagcgcgtgcagcgccgataacacaacaaccgaccaggcaaggtacaggtgaaccgtaccggcggtatccgcctgctctgcgccgtctgtcactgtggccggtacatcaaaccagccgaaaaccgatatcgcctgaccatttgccgttgagataaaatagccggtgatcagaatggcaaacaaaataccgtacagcagccagtgcgccagtgcggcactgatgcgggtaaaccggctgtaagtggataatgccggcggcggcggggaaagccagcgccagatcatgcggacagccaacacaataaacagcaggatcccgatactcttatggatctccggtgcgcggtgataccagacatcatagtaacccagcgaaaccatccacagccccagtgcaaacatcccgtaaacggtgattgccacgccccagtgaagcagaacggagaggtgcccgtaccgttgcgcactatttttccattgcattgataaataccctttgctgttccatacggataacatttcagtaacagcgggatactttacgtgaattttccggccatatcggacaaatattttgtttaagttaatcaaattaagtcaataacttattaatttaactgtcatttttatatcgatataaaatattaaaccggaaaaatcttatatagcgggattttgtaagactgaatcggactgagttataaccagaatgcaggaaaatccgcaatccggcggatattaccaaaaaataattttaatatttaaaaatatttttgataaaaaagttgacgaacatcacataaatgctatgatacatccatcgaagcaaaacagcttaccaacctaattcaaaagcaggagttcattatgaaaagcatcaaaactttcttttccaatctgacccgtgctgctgctatcattgcaaaatatagcaaagcattctgattaaaatcagacagatacaaaaaagcgcccgatgggcgctttttttatgatctgcagatcaccggttattgtgagtcctgccgtagttaaaaacaattttaatatcttaaaataaagtttatataaaatttgacattcatcacaaaaatggtatagtagcgccatcaaagccaaacaggcttaatcacttactcaaaagcaggagtttattatgaaaagcatcaaaactttcttttcttatctgacccgtgctgctgctattattgctaaaaacagcaaagcattctgataaatcagacagatacaaagaagcgcccgatgggcgctttttttatgctgctttattttgccagcggcgcaaataaccagcgcagccaccagcgggctttccagcccggatttttctcccggactaccggcgatgtacggcagaccgaccgcagaattttccattcaaaatccaggaacagccgggaatgaccggattccgcaccatacgtgcagacttcctcatgcttgcgtttatcaaccggcgtgttgtattccagacttctgtccagcgtatgataagacttatcacgatccacaatccgctctgtggcatacaccgatttcggcaggtagcgctgacgggagccgtgatatttctgcagtttcacaaaacggtaatcttccgcgccgtaatggccgcaaaactcttcatcataaccgtaaaaacggaagaagcgggcgcgggacataaagaacagattggaatgccctttacggagattcccctgctcaccccggcggtagagtttatagaatgtccggcccgggtttgccgcattaatcagataagtaaacgtcgaaaccggcaggacatgatccaggtcggtcatcagaattttgtctgacgccgcataggtcacccccagattacgggaaccaccctggttccacggaatatcggttgtgatccgcagccatgtcagatttaaatcaaattcaggaatttcatactcaagcggagagcagtcatcaacaatgacaaactgaacatagtccagcaccgatgccggcatgctttcatattcacgaagcagattgataacttcagaaatatcttgctgattacaatagaaatgagtgatgtaagtaagttttatatgttgcttatccgcaacttttcggaagaattcgcgtgacattatacctgtgaccctgttaccacaaatgaccgaccggcaattagcaaccagtgcgatgttaattgccggctattctcacatacaggtggtacagtgtcactacttagcggggataaactattcctgatcgaaaaagtaatccaccggaacatggaacatttctgccagatacatcagataatgtatactaatccggcttgttccccgttcataacggttaaattgctgctgcgttattcccatgtcttccgctaaccggacgatacttaatcctaagtatttacgcttttctttaatccgtgttccgacacagaaatatatatattccgtctccataagattctccttcacttatattgacaacgtgataacaaaaaattccgtttttcagagtctgccatccgcttacttaccagcggctcaataacctcataacaacatgaaatttaaaaaaataaaaatcaacagtcatgaataaccggcatcttcagtcttagtaatcgggatttaaccttataggtgtattctttgcaatatcaatacgtctgtttaatgtaataatacctacccgaccacaattaatatcaaaatcaggtcttaataagattaaaagtaattctgaaaaaaacgattactgaatatcggttaataatataccccggtatttcataaaaataattgcgtgaaaatacttaagaaatatttatattacttccttatcacctgcttaagaaaggctatttccggctatgtgttagttgcatcacagaaaaaatacatatgtatagttataatttacatatgtagccatttatctctgtttctgaggttatcttatgacgcaaaaaacccctgccggatataccccgctaacctgtggcacccttcccgcttacctgtccgcacatttaccggatgacattttaccaggcggcacgccggaatcctggcagacagaggaagtcggtgacggtaatctcaatctggtgtttattgtcagaggcagtgagcggactctggtggtcaagcaatcactgccgtatgtccgtgcggccggtgaatcctgggaactctctttgcagcgtaattatttcgaataccatgcgttgtcacaggagaaacgtttcgcacctgacagtgtgccggatgtctatttctatgacgaagccatggcgctgtttgccatggaatacctcgctgaccatatcattctgcgtaaagcactgattgcaggagaatatgtccctcagctggcggagaaaaccggcctgtttatggcgcaaactctgttccatacctcggatatcggcatggcggcacaggagaaaaaagccctgaccgcacagttctccgctaaccatgaattatgcaaaatcaccgaagatctgatttttaccgaaccttacttcccggcgccgcgcaataatcacacctctccgcagcttgaccgcgatgcaaatgccgtgatgctggacagagaaatggtgcaggtcgcgatgcgctataagtacaaatttatgacacagtcacaggcgctgctgcacggagatttgcactccggatccgtcatgattggcactgactctgttcaggttattgatcctgaattcagttttatggggccgatggcgtttgataccggcaactatgccggtaacttatatatggcctggttttctcagcccggacaccggaagacagaggaagagaccgcgcgctatcagcaatggctgttatcgcagataagccagacctggaatacgtttgagactgaattccgccgcctgtgggccgaaaaatcacagggcgatgcctggccgcgtgagctgtaccaggacggcctgtttgatgacaaattcctgaaagccgctcaggacagcttcttcgaagaactgtttcaggacacgctggtcaatgccgggctggaaatcaaccgccgcctgctcgggtttgccggagttgctgatttcaaaaccattgctgatgcggacaaacgcgcggtacttgagcgcaaagccctgaaactggcgcgggagctgattgtcaacgcgcgccattatcacagctttaccgatgtcgaagcctttctttcttattgttaagcgtcacctgcacacgaggttatataatgaaaattaacggaaaacattaccgttccgtctggcccgcagataatggtattgatgtctgtatttttgatcagacaaaactgccttttgaagtcagtatcatcacactgacgacgatggaggaagccgcaacgtccatcaaagatatgtgggtacgcggcgcaccgctgattggtgctgtggctgcttacggcgtggcgctggcgatgcaccgtgacagcagtgatgccgccctgaaaaacgcttatgacgtgctggttgccacccgtccgaccgcgatcaacctgaaatgggcgctggacagaatctgcggtgccctgacaccacttcctgcggctgagcgcggtgacgccgcataccgtattgccgctgaaatcgctgatgaagatgcggaaatttgtcaccgcatcggcgaacacggcctgacaattatccgcgacatcgccgcccgcaaaaaaccgggtgagccggtgaatatcctgacccattgtaatgccggctggctggctaccgttgactggggcaccgcgctgtcaccgatttatcaggcttatgatgaaggcattaatattcacgtctgggtggatgaaacccgtccgcgcaaccagggcggactgactgcctttgagctgggctcgcacggtgtgccgcataccctgattgcagataacgctggggggcacctgatgcagcacggcgaagtggatatgtgtattgtcggcactgaccgcaccactgctcgcggggatgtctgcaataaaatcggcacttacctgaaagcactggcggccaaagcgaacaatgtgccgttctatgtagcgctgccgtcaccgaccctcgattttaccgtgtgggacggggtaaaagagatcccgattgaacagcgtgccggtgaggaacagtcacatgttttcggcatcacaccggaaggtacccgcagctgggtgaatactgcacctgcgggcacccgttgcggtaactatgcctttgatgtcactccggcggagtatgtcaccgggcttatcaccgaacgcggcatttgtgatgcctccccggccgggctgaaaggcatgttcccggagatgtggccgtctgagtatgaggtgtgatcatgacccgtactgaactggcacaacagattatcgatacctgtctgaagatgaacgcaagcgggctcaaccaggggacgtccggtaatgtcagcgcccgctggcaggacggcatgctgatcactccgagcggcgtgccttatgaaaaactgaccccggacagcattgtgtatatggacagtaccggccaggcagaggcggataaaatcccgtcgagcgaatggcactttcacctgagctgctatcaggcgcgtcctgagctgaatgcggtggtccataatcacgctctgaatacagcggcggtatccattctcaatgaatccattccggcgatccattatatggtcgccgtgaccggaaccgaccatatcccctgtgtgccgtatgccaccttcggcacacacgaactggctgatattgttgcggaagggattaaaaccagtaaagcgctgattatgcagcatcacggcatgctggcgatggaaatcaacctcgaaaaagccctgtggctggcgcatgaagttgaagtgctctccgcgctgtatctgaaagtccgcgccatcacgccggatgtaccggtactgagtgcggaggagatgcagcgggtgctggggaaattcaaaacctacggactgaaaaccggaaaatagtaattaccggcggcagaaaacggcgcaatgcgtcgttttttgtcaccttacgtaattaattattttaaatgataatcatttgcaatataattaaaatcttaatgtatatgttatttaaggtttttatgaaaaaagtcatttgttacgctgcgtttgcttctgccgttcttctcctgtccggatgtgccgccacaaaaaaatccccgcaattcagcgaaaaaagcattgaagagtgcggacgctatctgccggacggcattgcttactatgtctcgattgaaggcgaagtcgatttaaacaagcagtttaacggtgatatcaatgtgaccgcattgcaggacagtgcacccgcagttgcatttaaccacgagctgattcaggccggtgcggataaatatatggactgtgctattcagttgctgaataacggtaagggagatacccgcacaccggaagaaaaagcagcagcggaaaaacagtaaccggcgatattgatgctctgatgtaaaaaaaccgccttccggcggtttttgcacttatttatctgacagcaaatgtgctgcgatcagcggatcaacaatcaaatcagaaacatatccgccatacagtgccccgcgggtggcggcgatattttgttcaccggtggcaataaaaatccgccgtgcgatattccgcaactgcggcagcctgataccgaggatgcgggcatccgtatgggtatccagcggctcacccgcctgatcataaaaacgtccgcaaataaccccgacagcccctttgcggcggaaatcggtcatttcctccgccgtaatcacgccggcacggatcagcggattctcttccgtgacatttccggccacaaacagtgctttggtgcagcgatccagctgagcaaagtttgcctgaatgataggctcacggcgcagtgcatctgccagctccgcagagctgacaatcgcgggaacatgcagatacgcacactcaccgccgaactttccggcaatcagcgaggacgattccaccgtggtgaaatccggctgcgacggcacggaaccgagcatctgtaataccgtcatattgcggatgacttttggtgtcagacacttcgccatatggtgaattgtccgtccccaggccacgccgagcacatccccgtcctcaatcacctgactgagatacaccccggccgcctgtgccatgttttcccggcagcgggcggaatctgccgccgcctccgtaaccgggctgtccggtaccaccagcacattggtcagattgaacttttttttcagtgacaacgccatatcgatgcggctgtaacgcgccatatccaggctgatatgcaccacaccgttttcccgggccgtctgcaggtatttcaccacggtcacgcgggaaatccccatcgcatcagccacctccgtctgactgagaccggactgataatagagccatgcggcctgcagaaccgggtcattaccgaacatcaggcgtccggtcaggcggttgtcactgtttgtcatgcttcgcgcaccacgctgccccagagatcatactcatcggcatgttcaatattcaccatcacaatatcccccggctgcacatcaaattcaccgttgagatataccataccgtcgatttccggcgcatccgccatactgcggccgacagcgccctcttcttcatcaacttcatcaatgatcaccggcagtgtgcggccgattttttcagccagacgctctgcggagatctgctgctgtaactgcataaagcggtgatagcgctcttctttgatctcttccggcacctgatccggtaattcgttggcatgtgccccttccaccggactgtatttaaagcagccgacgcgatccagacgggcttcagtcaggaagtccagcagcatctgaaagtcttcttcggtttcacccgggaagccgacaataaaggtggaacgcagtgtcagttccgggcagatttcacgccagcgtttgatacgctccagtgtgcgctcaacggcacccgggcgtttcatcagtttcagaatacgcgggctggcgtgctgtaacgggatatccagatacggcaggattttgccttctgccatcagcgggatcacatcatccacatgcggatacggataaacgtaatgcagacgcacccacacaccgagctgggataactgctcacacagaccgatcatactggttttcaccggcagaccatcgcggaaaccggtgcggtgtttgatatcagcgccataggcagaggtatcctgggagatcaccagcagttctttcacaccggcttcaaccaggcgctgcgcttcactcagcacctcaccgacaggacggctgtccagatcgccgcgcatggacggaataatgcagaatgtgcagcggtgattacagccttcagaaattttcagatacgcgtaatggcgcggcgtcagtttcacaccctgctccggtaccaggctggtgaacggatcatgcgccggtttcggcacatatttacggacattcgccagcacctgctcataactgtgcggaccggtgatttccagcaccttcgggtgcacttcacggatctggtcttctttcgcacccagacacccggtcacgatcactttaccgttttccgccagtgcctcgccgatagcttccagggattcctgcacagcactgtcaatgaaaccgcaggtattgacgatcaccacatcggcatcatcatagctcggcacaacctgatagccgtccgtgcgcagttcagtcagaatccgctcggaatccaccaggtttttcgggcagcctaaagaaacgaaaccgactttcggcactgtgttggtattttgcgacataagctcatttactcaaaagagcaggatgcagcaggatatttccggctgcatcccgcagatattagtcattatcggaaaggaaagagacaaattttagcaaacaaactcccctgactgatagcctccggcgtaaaaaatccctgtgtcagataaaaaaccagtgcaattcgtgcaatcccccggcgctgtattctgccgtttacagtgaatgtgatatatacggcagctttatcctgctgatccggttatgctttctttgtcagcatttaatgtcatcgttctgaaaattaaaagcatcattatttgcgaacctgatattgaaatgctgctgttgtgcttatctcattattttccataagaagggtaatcacggtatctatgcaaaaatcaaaacgtaaaacgtggattttttatctcatcctgatcattgtccttgccgccggcggctacctgttccgcatgctgcaaagcccggggctgcctgcgggcttcgctcagagcaacggacggatcgaggcaacggaaattgatatctcaaccaaaaccgccggacgcatcagcaccatcaatgtcagagagggggattttgtccgcgccggggatgtgctggcgcagatggatacccggactctcgaggcgcagctgagcgaggctcaggcgcagtaccgccaggcggacagtaatgtgatttcctcgcgctcggcactggctcagcggaaaagtgagaaagctgccgcagaggcgatggtacgccagcgtaccgcagaactgactgccgcgcagaagcgtctgacgcgttcacaggcactggtgagaaccaacgcggtatctgttcagcaggtggatgatgacctagctgttgtccagggtgcccgtgctgccgtggaagcggcgaaagctcaggtggcagcggcttctgcggcgattgatgccgcacagtccggtattatccaggcacagaccaaagtggatgccgctctggcgacacaacaccggattgaagcggatctggatgacagccagctgaaagcgccgcgcaacggccgtgttcagtatcgcgttgccgaaccgggtgaagtgctcggtgccggtggccgtgtggtgaatatggtcgatctcagcgatgtctatatgacgttcttcctgccgaccgaacaggccggacaggcgggcatcggcagtgatgtgcatattgttcttgatgccgctccggacctggtgatcccggcgaaaacctcgtatgtcgccagtgtcgcgcagtttacccctaaaactgtggaaacagataatgagcgccagaaactgatgttccgcgttcgtgcgcgtatcgcccccgaactgctggaaaaacatctggaatatgtgaaaaccggtctgccgggacgcgcttatatccggcttgacccgaagcaggactggccggctgacctggaggtgaaattacctcaatgacatcatcaaaacagcattccgacaccgcaatcgtcaccctggaacaggttacgcatcattacggtgatgtgtgcgcccttgatgatatcacgctgaacatccccgcccggcagatggtggggctgatcgggccggacggtgtcgggaaatccaccctgatttccctgattgccggtgcccgtaaagtgcagcagggtaatgtgattgtgctgggcggtgatatccgcgaagaagagcaccgccgcgcggtatgtccgcgtattgcctatatgccgcagggattggggaaaaacctgtatcacaccctgtcggtgtttgaaaacgtggattttttcgggcggctgttcggccagtctgagaaagaacgtcgtctgcggattgacgatctcctcgccagcaccgggctcgccccgttccgcgaccgccctgcgggaaaactctccggcgggatgaaacagaagctcggactgtgctgtgccttgatccatgacccggaactattgatcctcgacgaaccgaccaccggcgttgaccccctctcccgcgcccagttctgggagcttatcgaccgcatccgcgaacgccagcagaatatgagtgtgctggtggcgacggcctatatggaagaagcggaacggtttgatcacctggtcgcgatggacgacggcaaagtcctggcgacaggacacgcccgtgaactgaaagcgcagacacagactgatgggctggaagccgcctttatcgctctgctgccggaagaaaaacgcaaagatcacaaagcggtggtgatcccgccgcgcaaagcgcaggataatgaagagattgctatcgaggcgcaggatctgaccatgcgcttcggcagtttcaccgccgttgaccacgtcagtttccgcatcccgaaaggagagatctttggtttcctcggctccaacggctgcggtaaatccaccaccatgaaaatgctcaccgggctgttgcaggccacggaaggcaaggcgtggctgtttggtcaggaggtcgatccgaaagatttgaatacgcggatgcgggtcggttatatgtcgcaggcgttctccctctacagtgagctgacggttttacagaacctggtgctgcacgccaaattattccatgtgccggaaaacgaaattgatgaccgcgttgatgaaatgatgacgcgctttaaactgacggatgttgccgatgccatgccggaggggttaccgctcgggatacgccagcgtttatcgctggccgtggcggttattcaccgcccggaaatgctgatcctcgatgagccgacatccggcgttgacccgattgcccgcgatatgttctgggatctgatggtggatttatcacgcaaagacggcgtgacgatttttatatccacccactttatgaatgaggccgcccgctgcgaccgcatgtcgctgatgcacgccgggaaagtactggtgacggacacgccggaaaacctggttgccggcagtgaatttgataccctcgaagccgtctttattgattatctgaaaaaagcctcgggaattgaggatgatgccccgccgccggaagcgccggaattacccgccgacagcggcgaagcggcggccacggcactgaagcgccgtttcagtctgcgccgtctgttcagttatagtctgcgtgaggggctggaactgcgccgcgacccggtgcggctgacactggcgctgctcggtacagtgatcctgatgtttattatgggctacggcatcagtatggatgtggaaaatctgcgttttgccgtgctcgaccgcgaccagaccaccaccagccagaactatgtgcaggatctctccggttcgcgctactttatcgaacagccgccgctgcaaaattatgacgatatggagcgccggatgcgcgccggggaaatcgcggtggcgattgaaattccgccggattttgcccgtgatatcgccaaaggccatgatgtgaaactgggtgtctgggtggacggcgccatgccgaaccgggctgaaacggtgcgcggttatgtgcaggctatgcatctcaactggctgacccgcatggcatcaaaacagccggtggcaaacccgctgcgctctgccatcgatatcgaaacccgttaccgttataacccggatgtgaaaagtctgcctgctatcgttccggcggtgatcccgctgctgctgatgatgataccggcaatgctcagcgcccttagtgtggtgcgggagaaagagctggggtcgattatcaatctctatgtcacgccggtgaccaaaacagagtttttaatcggcaaacaggtgccttatatcgtgctggggatgtttaactttttcctgctctgcgccctctccgtctgggtattcggagtgccgttcaagggcagtctgctgacggtgacactcgccgcattctgctatatcaccattgccaccagcatggggctgctgatctcctgctttatgaagagccagattgccgcaattttcgggaccgcgattattaccctgatcccggccacccaattttccggaatgattgacccggtttcatcactggaaggtatgggttactggatagggcacatctacccgaccgctcatttcctgaccattacccggggaaccttctccaaggggctggggcttatcgatctgtatcaggcctttattccgctgttgataactattccggttgttctcgggtgcagcatctttttcctgaaaaagcaggagggataacatgcggacactgaagaatattatctatctcggcatgaaagagctgcgcagcctgatgcgggataaagcaatgctggcactgatcgtgtttgcattcacggtatcaatctattcctcggcgacggtgacctccggttcgctgcatctggcaccgattgccattgcggaccaggatcgctctcagctcagcgagcgcattatcaacagcttttacgagccctattttctggccccggcagatattgatatcagtcagatggacggcctgatggacagcggcacctacacgtttaccatggatattccgccgaattttcagcgtgatgtgctggccggacgccgtcccgccattcagttgaacgttgatgccacccgcatgagccaggcgtttctcggcaacagttatattcagaatattgttaccggggaggtgaatacttttctggctaaaaaccggcaaaacacggtgctgccggtggatctggatatccgcgcccgttttaacccgaacctgaatcagatgtggttcggatcggtaatggcgattatcaacaatatcacgatgctgtcgattgtcctgaccggggcggcactgatccgcgagcgggaacacggcacaattgagcatctgctggtgatgccggtgacgccgtttgaaatcatgatgtccaaagtctggtcgatgggattggtggtattgcttgcctcactcggctcgctgctgctgattgtccgctttctgctgcaggtgccgatagagggttcaattacgctgtttatgtgcggggtggcgctgagtctgtttgccaccacctccatcggaatttttatggggacgctcgcccgttcgatgccgcagttcgggctgctgatgattatggtgctgctgccgctgaatatgttatcaggcgggatgacctcgcgggaaagtatgccgcagtttgtgcaggatattatgcagaccatgccgacgacacactttgtcagcctggcacaggctattctctaccggggcgcggatttcctgatcgtctggccgcagtttatttatctgatcattatcggcggcgcgttttttggtgcggctttgctgcgcttccgcaaaaccatcagtgcgatggcatagaggcggggtattgctgccaacattgagtgccggcaaagtgcagccgccgccggaaagaataaaaccatcttctttcaaaccagggcggcgggataaccggcaaagcggaaagccgctgacacgtccctgttcgcgaaatctgctgaatcatccggtttgtggcaaggcggcaagggaagaattccggggagcatacatcagtatgtgaccggggtggacgaacgaagccaacacagccacaggcggaaggatgacgcggattcaggatttgaggagaccgcgcacaaccaccttgctcgccggggcgctgcgatccgtcgcccgccgcactgccatattgatggcctgccaggcaatttcctgaagatcatgggaaatacacgggaaattgaatccgtaaatatcggcatgagagacttcatcgatgctgaacagcgagacgtctttttgcgggatcaggttgtggcggatacaagctttgataatcccgagtgagatctggttattgcagccgacaaaataatccggcgcgggatggtatttcaggtaatggtcggtgactttaaaggcttcatccatcaggaagtccgcatgcagcacattgacgctgctgacctggccgtgcagaccggccaccatgccggttacgcgatcctgggccacattggaatcttccgggccggagacaatcaccacgttatccgctttttgtgacagcagatagcgccctgcctgcaatccgcagtcgaggttatcgatgtaaacgccgctgcatgccttggcatccaactcgcggtcaaccaggatcaccggaatattgagcagttccagctgtttcatatacgccgggcggtaaacccgttcggcggagacaacggacagaatgatggcatccacgttgtaaccaatcagcttatcaatgatacgcgcttcattttcacgtgattcataagagtcaaacatcagcgtgtcatacccggcgttataggcttccagggtgatgcgcttggccagcccgccgaaaaacgggttgctcatgtcaggactgacaataccgatggtacgggaggatttcgcgcgcaggctgcgtgccgccgcattcaccacataaccgattttatctgcggcatcgagaatacgcctgagagtttccgggtgaaccttatccggctgcgaaaatgcgcgggatgcggtgatcttactgacattcgcaatagcggccacattttccagtgtgactttctgtgtccggggttccgccaattttctctccttagcagcaacgtatcattttataccattataatatcatctaaatcgattcagtcacgtgaaaaacacgctttttattacttaaaccgacactaacaactttttaacactcgagtctttttatccgcggatcggtaaaaatgtcgtattcatcggtattttctgtggagaactccgacaccaccgcgccctgcggcccggctttaaaccagtgacgggtgtccggcatgatggtgtactgctctcccgggcgcagcagaataaagcggtcacaggtgtaccattcctcatccccctgcggcggacggcaaaccggattgccctgtgcatcctgattcagcgtcagcgccggatcatccacaaacagatacacctcaccccagcggcagcggaaggtttcctgcttgcccggccggtctttgtacggcggatggcggtgctccgggcaggtctggtcagcaaagagaaccagctctttggcgcagtacagcgggctgttgcagtacgtgagcagttgcaggcccgagcggggataatccggcagattaaagtgagcaatttcaatatgctgctgttccgcttctgtcagaatgatatgtgcctgttccagaaccgccagtgattccgcgatatacggctgtttattcatctgcctctctcctgaatgatatcgttatcattatagccttgtcacagatagcaaagatgtgacccggaagaccctttgccgaatactacatgagtagatcagactttatttaataaaagtttaaccatcatcacataattataataaacattgctctattatccgcatcatagcaatgatatcgatatcattttaatgaaaggaaatgatcatgaaggcattagtattagagaaagcagggaaaatcgccattcaggattggcagagcaatgaagtacttggcgacgacgatgttgagattaaaatccacaccgtcggtatctgcggcagcgacgttcactattatcagcatggccgtatcgggccgtttgtggttgaggcaccgatggtgctgggtcacgaagcgtccggagtgatcaccgcagccggtaaaaatgtgaagcacctgaaagtcggcgatcgcgtgtgcatggagccgggtattccggatctgcaatccccgcaatcccgtgccggtatctataaccttgatcctgccgtccgtttctgggcaactccgccaatcgacggctgcctgcgtgaaagcgtgatccaccctgccgccttcacctttaaactgcctgataacgtttcctttgcccagggtgcaatggttgagccgctggcaatcggtatgcagtccgcgaccaaagccgggatcaaaccgggtgatatcggtctggttatcggtgccgggaccatcggtatcattaccgcgctgtgcgcactggccggtggctgttccgatgtcatcatctgtgatgtgtttgatgaaaaactgaaagtggctgagaaatatcagggcctgcacgcggttaacagcaaagaccagcaggcactggcggataaagtccgtgagctgaccggcggcgaaggcgtgaacgtcctgtttgagtgcagcggcgcgaaaccggttattgcgtccatctctgatcatatcgccccgggcggcaccgcagttctcgtcggcatgcctatcgacccggcaccgctggatatcgtggcggcacaggcgaaagaagtgaccttcaaaactattttccgctacgccaatatgtatccgcgcaccatccgtctgctgagctccggcaaactgaatgtggccccgctgctgtccgcaacctacaagttcaaagacagtgtcgaagcctatgagcgtgcagccgaaggccgtgcgactgatgtgaaaattgtgctggaaatggagtaaaccatgacgctctatgccggtattgactgcggaacacaaagcaccaaggtcattattgccgataaccggaccgcgcgtattctgggtgagggctcggcctctcacccgatgatcagcgaatcagacgggagccgtgaacaggaagctgtctggtggactgatgcgctgcaaaccgcgtttgctcaggcgatcaaaaacgccggaattgacgggcgggatatccgcgccctcgccgtttccggccagcagcacggttttgtgccggtcagtcatgacggtacggtacttgcgcctgccaaactgtggtgtgatacctcgaccagtgcggaaaatcagtggtttattgatgcactgggcggtgaacaggccgcgcttgaccgcctgggtgtgttgccgcagaccggctataccgtgtcaaaaattatccgctttaaacagcagcacccggaactgtggaaacagctgcgttatgtactgctgccgcacgattacctgaatttctggctcaccggacaggcctgtgccgagtacggagacgcctccgggaccgggctgctcaatatccgcagccgtgagtgggatcaggccgccgctgatcttatcgatccggaaggccgtttatggcaggcgctgccgccgctggtgcgcgcagagcaaatcatcggcacggttcgtccggagatcgcggaaaagctcggtatttccccggaaacccgcgtggcatccggcggcggcgataacatgatggccgccatcggtaccggaaatatccgtccgggcatcactacgatgagcctcggtacctccggtacgctgtttacctttgcggaacaaccggttgtggcggattccgcgatgatcgccgggttctgctcctccagcaatggctggctgccgttgatttgcaccatgaatgtcacctccgccaccactacggttcagtccttattaggcatggatattcaggcctttaatgatgcactgaacagcagtaaacccggtgcgggcggtcttattatgctgccgttctttaatggtgagcgcgtacctcagttacccgaagcccgcgccagccttcacaatatggacggcagcaacctgactccgcagaacctgagcctggctgtggtggaaagtgccacttacgggctgcgcttcggtatcgatctgttccgtcagcagggaattaccaccagtgagatccgtctgaccggcggcggtgcccgcagcgtgaaatggcgtcagattgtcgcggatatcatggcggcaccggtggtgtgcgtcaccaaccaggaagcggcagcgctgggtgcagcggttcaggcaatctggtgtgacaccctcagcgcagacagcgcaccggaagcacagctggccgctctctgcgaccgctttgtgcaactggatgacagcagccgcacacagccggatccggcgaatgtggcggtttatgagtccctgtatcagaactaccttgctttactgacatcagaatacccggaggtcaccgtatgacagccactgtcgctgacaatgaggaattactgcgggttgaaggggtgcgcaaagcctttggtcaggttgttgcactgaagaacgcgcagttttcactgaaaagaggttccattcacgccctgtgcggcgggaatggcgccggtaaatccacgttcctgagcatcctgatgggctttatccgcccggatgcgggggaaatctatgtcaaaggcaaacgctgtgagtttcatcagccgatcgaagccctgcacgccggtatcgccattgttcagcaggagctgagttccattcctgatctgaccgtggcggaaaatatctggctggggcgggagccgcgccggttcgggtttgtcgattttaaacagctcaaccggcagaccgctgaactgctgaccgacctgcattttgatatctccccgtcagaaaaaatgcgcaacctgagtgtggcggaacagcaactggtcgaaatcgccaaagccctctcccacgcggatgcggatatcatcattatggatgagccgacctccgccatcggcgaggaggatgcgcagaagattttcgatgtcatcacccgcctgacggaaaaaggtaaaggcattatttatgtctcacaccgcctgtccgagatttttcagatagccgataccttcaccattttccgtgacggtacctttatcaccgacggcccgctggcggatatcacccgagagaagctgattgagctgattatcggccgtgaaatcaaagatgagttcgccaaatttaacgagccgacagatgaaaccattatggaagtccgggagctgtcccgtgatgaccaggtgcaggacatcagcctgacgctgaaaaaaggcgaaatcctggggatttacgggctggtcggttccggccgttctgagttcctcgacctgattttcggcatcgaacacgccgataaaggcaccataaaaattggtgaccgcttcctcgacaaacacacaccgaaagattccattaatgccgggatcgcctatgtcactgaagaccgcaaagataccggactgatgctgggccgttccatcaacgaaaacatcaatatcgcctcgtttggtgccatcagtaccggcggctttattcatgaccgcaaagagcgtgcccgtgcagacgacatgatcacactgttcaatgtcaaaaccccggatgcggatcagctggtcgggaacctcagcggcggtaaccagcagaaagtggttctgggacgctgggcgctgatcgagccggatgtgatgctgctcgatgagccgacacgcggcgtggatgtcggtgccaagaaagaaatttataagtttatgtctgagttcgccttacagggcaaaggcattgtgatggtctcttctgagctgtcggagattatcgggatgagtgacaggattattgttttccgtgacggacggatcgccggagagctgaccgccgccactgccacccagactgatttaatgaaacttgcggtgtgatctcacccgccaacgtatgcatgaataaagagaagtgaccatgactacaacaaatactgcacccgcaccaggggtctcatttatcgcccgtaacaagaaaaacatgcacaaatacggcattattctggcgttctttgtgctgtgtctgattgtggcggttgtcggtgaagttcaggtcgcccgcggcgaatggaccaataactactttctgagtcaggacaacatgctgattatcctgcgtcagatttccatcaacggtattctcgccatcgggatgaccttcgtcattatcaccgccggtgttgacctctctgtcggttcggtgctggcactgagcgggattgtggcggcgcggtttgccaccagcaacaccggtctggctatcggtgataccgcgaatgccgtgatgatcccgatgattatcgcactcggcatcggtatcatttgtggtctgcttaacgggaccattctggcgaaattcaaccttcagccgtttatcgtcaccatggggatgctgtctgcggcacgcggtctgactctgctgaccactgacggtaacccggtttcccagctcaacagcgatttccgctggctgggtaacggctatatcctggatatcccggtaccggtggtgatcctggcggttatctttattctggcctggattttactcaataaaaccaccttcggccgttatgtgtatgccgtcggcggcaacccgaaaagcgccagaacctccggtatcagcgtgattaaaattaaagtgctggtttataccctgtgtggcgcgttagccggtattgccgggctgattctgactgcccgtaccgggtcagcacagaccagtgcaggcagcgcctacgagctggatgcaatcgctgcggtggttatcggcggcaccagtatggccggtggtgtggggacgttagtcggcaccctgttcggcgtgttaattatcggtgtgatgaataacggtctcgacctgctgggcgtgcagtcgtactaccagcagattatcaaaggcgcattaattgttatcgccgtacttttggatccgtcacgtaagcaacgccgtgactgatggcagtaccgcgcggattctttcagcctgccactggctgaaggatgaagcgtaaaaaagacgaaaacagcaaaaaacaaaagcaaaactaccctacacaatgaaggaatgaccatgaaaaaactgaccaaaatcgctgcactgacagccctgatgatgggcggacaggcatttgcggcacaggacaatccggtgaaaattgccgttctgatgtacggcatgaaagctgaatttgtccagttaatggaaaaatccgcaaaagagcatccggctgtgaaaaacggtgaagcgatcatcacagtttatgatggccgttatgatccgatggttcagaacaaccaggcggaaaccgcaatccagaccaaagccgacgctatcatcatcaacccgatggattatgaagcgaatatcgacgtggtcactatggcaaatgacgccaaaatcccggttatcgtcaccaacgcccgtctgaacaccgacaaaatgaccgcagaagtggtgtctgatgacgtcctcggcggttatatggaagccaaagcggttctggaaaaaatgaactgtgaaggtaacgtggttattatcgaagggccgaaaggcggcagcggtgaaattcagcgcggcgaaggtaatgacaaagcgatcgcagaatgtggtccgggtaaagtgaaagtactggagcgcaaaacggctaactggtcacgcgcggaagcgatgccgctgatggaaaactggttacagaaacaccgtggtaaaatcggtggtgttattgcacagaacgacgaaatggcactgggtgcgatcgaagcaatcaaatctgccggtctgaatgtcaatgatttctccattgccggcgttgacggcgtgtctgatgctatccgctctgttcaggaaggcgaaatggtctccatcctccaggacgcgaatgcacagatgcagggctctatcgacctggcgatgaaagcagtcaaaggtgacaaatacgagccgcagtccaaaatctgggttcagtatgctgaccagttgaaatggaatgacggtaaagacaaacgttacgcgattccgtggactcaggtcaccaaagaaaacgcgcagcagttactggatgcccgtaaataaatacactcccgccgtcttcttatgaaggcggcgtttttttatccgcaacttcccctgttcaggcggttttatacacaattcaaaaaagtcatgtccggaaagcggcatgaaccgctgaatatcccgcaacgccgtattcatccttcccctctgattaattcaccgtatgataggcttatctgccggataaatgtgcgatgtgaaataatggatgacagagaaaaggcggttgaaaaagtcagaaagctgatgtctcttgccgaaaatgccggtaatgagaatgaagccgcgaacgccttttcaaaaacgcggatatttatgaaaaaataccaccttgaactgtctgatatctattccgcagaaccgtctcccccgccccctctcctcgcagaaaaacaccaccgcgcccgctgaccccggaagaggagccgcgcccggtcagattacacttcaccggcccggcactgattttcattatgctgctgttatttgtggtttatatactgtatttacagtaaatggccggcaccggttacatacggaataccgagtatttccatcgccagtgcattccacgcacggcagctgcggctctgatacccgccgcgcacaccggccagtgccagatcgtaggagagcaccgggtcggtcaccggcagcagtaccagaccatcagccgtgcgttcacgccacatgctgtccggcagcagcgtgatccccacccccgccctgaccatcgcaaggatcagatcaaggtgattgctccgtcctgctaccaccggttccgtgctgtaaatcccgcacgcgctgcgcaccaggtcgtttatccggaatgcttcggagaaaaacacaaacggctcacggataatctccgcaaagctcacctgtttttttgccgccagcgggtgctgatgattcaccagcagcatcagccggtcggtggcgaaacggtgcagctcaaacagctgctcatcaaacggcagcatcaccgcagcggtttccaccgtaccgtcggtcatcgcttcggccatctgtttcgtgcccagttcaaaaatcttcagttccacctgcggatggcgggacgtaaacgccatgataatcccggcaaaccaggtcgaggcgataaccggcggtaatcccacattcagtgtgccggtcagcgggccggatttatcctgtaatgctttgttcatacactgaaactgcaccagaatccgtcgcgcgtgctcatacagaatcgccccttcatcggtcagcgtcaccccgccggtatcacggaccagtaacggaaatcccagttcatgctccagcttctgaatactgcggctgatggcgggttgcgtgacaaacaacgcctctgccgcccggctgaatcctttgtactgaaccacctctgtaaagtagcggagtgcgcgtatatccatgtttttgctgccctataacaaaaagttatcacactgatgattatataccatttccatttataccgcagaaccactagaaatgatcgtcataacacgtggttcgttctgaataaacggtgtgatcggagaagataacaatgacaaaaagcgtaattgagcatgttttaagccgtctggcagatttaggcatcaccgatattttcggtgtcgcgggggattttgcattccccattgaagatgcggtctgcgacggtaacacacagcgctggattggtaactgtaacgaactgaacgccgcctatgctgcagatggctacgcgcgtatcaagggcgccgcggcgctttccaccacgttcggcgtgggtgaattaagcgcgatcaacggtattgccggttcgtatgcggaaaacctgccggtttttcatctggtcggcatgcctgccagtggtgtgcagaagagtggccgccaggtgcatcacaccctgggcgatggtaatttcagcctgttctgtgaactggggcagcgcctttcatgtgcctacgccataatgaccccggagaactgtgtggcggagacggaacgcctgattgctgccgcgctgcgcgagcgccgtccggtctatatgggcttcccgtttgattacgcgacacagccggttcagatgccggaacaccttaccgcaccggcacaaccggtcagtgacaaaaccgcgctcactgaagcggttgccgcgatcagagcaaaactctcggacagcccgtccgcctgtatcctgccgggcatgctggccgcacgttccggactgattgatgacgtacaggcgctgatccaccggaccgggctgccttacgccaccatgtttatggataaagccatcatcagtgagtccgacccgcattacgccgggatgtataacggtcagctgatgaatccgcaggtcagggaatttgttgaaaacagtgactgcgtgctgggtatcggagcggtgatgacggactttaacaccggcagttttaccgctgatatcgccccggaaaagctgatcagcattatggcggatcatgtccgggtcggcgtggcaatctggcagaatgtgtatatgcaggatctgcttcccgccctgatcgccggacttccgcacagagaatgtcatattccggcagcaaccgggctgggtaaaccggtagctgacgcttccggtaatattaccccaccgtatctgtatccccgttttgagcaattgttcagaaaagacgacattatcatcgccgaaaccggcaccgtttctatggggcttggctttgcactgctgccggaaggggcgcaattccataaccagacgttatggggatcaatcggctgggcaacacctgcggccgttggagccgccatcgcggcgcctgatcacagattgattctgatcaccggggaaggctcacaccagctgactgcccaggaaatcagccagtttggccgttttggtctgaaaccacttattttcgtgctgaataatgacggctatctcattgagcgcctgctgtgcaaagacccggaagccgtttataacgacctgccgcagtggcgttacgcacaactgccacaggcgctgggatgcgataactggtattgccgccgcgtcaccacctgcacggagctggatgaggcaatccgggaagcggaaaccggtgaccgcgccgcatatattgaaatcattacggagcgctatgccgcatccgatctggcaaaaaaactcggtgaatcagtagcaacactgtactcgttttaactctccggtgatccggatgcagccccggcggcatccggatattaaaacccgtttttctcatataatgcgttgccggtattcaggatatatcagcggatatctgattccggatagtttctgtacataacttctttaatttcccggtctccgtcaaaacaaaaaccgagccggcgatcgaaccaggaataatagtaacaattgtcgcccggggatatctgataacggtttccgtaggctttaatcatatcctgatatgaatcccctgccgcaattccccgtctggttttataacgattgtttttgaaggttatttccgaaatatacttatcccgtcccccggtccgtttttcaataatcacattggtaccggcgacggtaattatcgtatcaccggtatcataacgccataattcaaactcacggataaaatcatgcagcggtgctacagagacctttttcttctgctgttccagccagcgggaaaccgtattatcactcagtggttttcccagtaaatccgcctcgccgtcatccgatgaccaaatgaaatcctgataattaaggtcattattttgttcatccgatttttccagcagtgacagttttatccagccctcaaccactctgtttttgctgttaatataattcacataggcgaaatcaccctgtttgcggtactgcaaaacatggtcaccacggataataaagcgatctgttttacattgctcgtccggctgataacctcttcatcaatcttatcatttacaccgtctgatatataaacagaaaccaccggatccggatagcccacccccagtgtccgtccgtttttactataaccgataaatacagtttcaggctcctgagaataatatttcaggatatcactgcgcagctgacttaccggctctccgggacggagtatcatcttaccggtcatcagctgataatcctcatccggcaacggattatccgttttctttttcggcttgcggtttacgtaatccacctcttccgcaagcggggatattctgaggttagtttccgtcagctgggataattacagccagccgtcaatcagctcaccttcggtattaatataaccgccaaacagataatctccggcgatctgataaccgataacggaatcacctttaatcagaaaactgtttttacttttacagcggctgtccggtgcggaataaaaataggcccggccgggagacgatacccggaaaatatggcgttcactccctgcactctgactttcggcctgacgggcaatattctgacattcatccgatactgccggtgaaattaacggataaaacaatgacaggacagataatagtatttttaccattcacacggataccgggaaataaacataataaacttatagcttattatctcttttatttccgcagtatccgtactgttttacactctttttttgttatcccttcaccagaatcacttctgtgccaatccggcgcagcccggtcaggctcgcttcaggaataccgtcatcagtaataatggtatcaatacgctgagtatcgattattttgtgcagactggaactgttaaatttactggaatccgtcaccaccacaatatgtccggccacttcacacatccgccggttaagccttgcctcatcttcattatgtgtgctgatgccgcgctccagatcaatcgcatccaccccgagaaacagcatatcaaagtgataattctgcaatgactgctccgcctgatcgccgtaaaaagagagcgactggcgccgcagctgaccaccggtcatcagcagctccacgcccggtgcttccaggagggcattcgccacattcatgccgttggtcatcacaatcgtatcctgatggtgacgcagctggcgggcaatctcatacgtcgtggtaccggagtccaggatcacacgcagccccggccggataaggtcggcggctaccgccgcaatattgcgtttgatagtggtgtggcgggtacttttatcttccagtgacggctcgctgaccggtgaaaccccctcacaaatcagtgcgccgccataggcacgcaccgcgatcccctgtttttcgaggaaagcgaggtcattgcggatagtcactgtggaaacatgaaactgctgcgacagctcattcacctgaacactgccgtgggtgcgcaaaagctggatgatatgctcacgccgcccgctcgttcccatcacccggttatccgtcccggcatccggactgttcatgattttatccttaacattcatttgaaaaatctttcgtttcatttcgtttggcatattaacgcttttctttgtccggaatgcaagcccataaaaagggtgaacaccggatgactcaggaattaatcctttcattatatttcttttgtgatgaagatccggatttcacaacctttcattttgttttctttttcctgtatagcagtatgttattcagacatcgaaacaaaaacaaaccaaatccggctgtaaggagaggaaagtgaaacttttaactgatatcgttgcccgtcacaaacggggtgagaaaacagggatttatgctgtctgttccgcccatccgtatattctgaaagcagcggtatgttttgcccgtgaacaacaaacgccgttactggttgaagcaacctccaatcaggtggatcagttcggcggttataccggcatgaccccggcggacttccgtgattttatgtggaagctggccgatgaacatcactttccccgtgaaaatctgatcctcggcggcgaccacctcgggccgaaccgctggcagaatgaaccggctgaagacgccatgacaaaagccgatgagctgatccgcacttatgttgccgccgggttcaaaaagattcaccttgactgcagtatgtcctgtgccggtgatccggtgccgctgacggatgaaatcgtcgcacagcgcgctgcccgcctggcggtgattgccgaggaaacctgtgagaaacatttcggcatccgcgacctggtgtatgtgattggtacagaagtgccggtgccgggtggcgctcacgaagagctgaatgagctggcggtcaccacaccgcaggccgcatctgccactatcgccgcacatcaggacgcatttgcgcggcatcagctcacggatatctggccgcgcattaccgggctggtggtacagccgggggtggaatttgatcataataatgttattgattaccgtccggaaaaagcccgtgccctgagtgagatgatcacacatcatgaccatctggtgtacgaggcgcactccacggattaccagaccccgcatgcactcagtcaattagttgacgatcactttgcgattctgaaagtcggtcccggtctgaccttcgccctgcgtgaagcactgtatgccctcgccggtatagaggatgagctggttgctccggcagtacgttccgggctgcgtcaggtgctggaagatgtcatgctgaaacaaccgggctactggcagagttattacaccggtgatgagcagacccgccgtcttgcccgcagctacagctattccgatcgcatccgctattactggccggatgagaccatcagcgcggcagtgacccgtctgctggaaaacctgacagaaacggcgatcccgctgccgctgatcagccagtatctgccgttacagtatccgctggtacgtgccggaacgatttccgccgcaccggaagagttaatcatcgcacacattcagactgtgctgcgtcactatcacgatgcctgtaaaaccatgcctgccgataagagcgagaaacagccatgccaaatattgtgttaagtcgtattgatgaacggttaatccacggacaggttggtgtccagtgggtgggatttgccggtgccaacctggtgctggtcgccaatgatgaggtggcggaagatccgctgcagcaaaacctgatggaaatggtgctgacggaagggattgccgtgcgtttctggccgctccagaaagtgatcgacaatattcataaagctgctgaccgccagaaaattctgctggtctgcaaaaccccggcagattttctgactctggtgaaaggcggcgttccggtggaacgcattaacgtcggcaatattcactataccgaaggcaagcgtcagattgccaaaactgtgtctgtggatgaggcggatatcgccgcattccgcgggcttaacgaggccggtgtcgcctgttatatccagggcgtaccgacagaaccggcgcaggatctgtttaaactgctctgaggatacatgtatggaaatcagtctgttacaagctatcgctctcgggctggtagcctttattgccggattggatctgtttaacgggctcacccacattcaccgtccggtggtgctggggccggtggttggtctgatcctcggtgatctcaataccgggatcctgaccggcgggacactggagctggtctggatgggactcgcgccgctggccggtgcccaaccgccgaacgtgattatcggtaccattgtcgggactgcctttgctatctccaccggggtcaaaccggaagtggcggtcggtgttgcagtgccgtttgccgtggcagtgcagatggggatcaccttcctgttctcggtcatgtccggtgtgatgtcgcgctgtgacaaaatggctgccaatgccgatacccgggggattgagcgcatcaactaccttgccctgctggcgctcggtacgttctattttctctgtgccttcctgccgatctatttcggggcggatcacgccaaaaccctgattgatgtactccctgcccgcttaattgacggactgggtgtcgcgggcggcattatgcctgccatcgggtttgccgttctgctgaaaatcatgatgaaaaatgcctacattccttattttattctgggatttgtcggcgcggcctggcttcagctgccggttctggcaatcgctgccgccgcactggcgatggcaatgatcgatttcgtccgcaaaccggcagaaagcgaaccggcacaaccgtcacacgaggaatttgaagatggcatctgaaaaaaatcattcatctgccgcagaagcggaaaccttactgccggcagactgtaaccagaacgtgtatgaagatcagagcaccggcgcggaactgacccgcaaagatatcaaccgggtcgcgtggcgctccctgctgttacaggcctcctttaactatgagcggatgcaggcggcgggctggctgtacggtttactgcccgcactgaaaaaaatccacaccaatccgcgtgatctggcacgctccatgaaaggccatatgggattcttcaatacccaccctttcctggtgacctttgttatcggcatcatcctggcaatggaacgctccaaacaggatgtaaacagcatccagagcaccaaaattgcggtgggtgcgccgctgggcgggatcggcgacgccatgttctggctgaccctgctgcctatctgcggcggtatcggtgccagtctcgcattacagggctcgattctcggtgctgtggtgttcctggtgatgtttaacgttgtgcacttcgggctgcgtttcggcctggcgcactatgcttaccggatgggggttgccgccatcccgcttatcaaagccaataccaaaaaagtcggccatgcggcttcgattgtcgggatgaccgtgatcggcgcgctggtggccacttatgtgcggctctcaaccacactggagattaccgccggtgatgcggtggtgaaattgcagagtgatgtgattgataagctgatgcctgctttcctgccgctggtatacaccctgtcaatgttctggctggtacgccgtggctggagcccgctgcgcctgattgtactgaccgtggcgctgggtattatcggtaaattcgcccatttcctgtgataaaaggagtcactgatgccgggaattattttatgtggtcacgggggctttgcctccggactggaaaaagccatgttacagattatcggggaacaggaggatttcgcggcggttgattttccggcggaatccaccaccgcccgcctgacacaggaactggaagccacactggcgctgatgtcacactgtgacagtgtgattttcctgaccgatattctcggcggtacgccgttccgcgtggcggccaccctgtcacagggccgggaagaccgcgaagtgatcaccggcactaatctgcagttactgctggaaatggcgctggagcgggattctctctctccggctgagttccgccgcgaagcactggcctgtggtcaccgcggattaaccagcctgacagacgagttacaacgcgaacgctgctgtgaaactgaggacgaaggcatatgattcagcaaatccgcgcccgccgtgtgctgacagaatacggctggcgggaaaatcaggcggtgacggtatcagacggcatcattaccgctatcacgccgctggcggcaaaagaaacacagtttgatgcagagcagctctgcccggcttacattgatacccatgtccacggcggacagggtatggatgtgatggatgataacccgcaggcgctgaaaaccattgccgctttcaaagcacaacagggcgtcgccgcgtggctcgccaccacggtgaccgccccgctgccggatctgcgcagcaccctcgggcggatcgcccgctactgtcagcagcaaaccaccacagagccggtggcggaagtgctcggcagttatctggaagggccgtatttcaccccgcagaacaaaggtgcgcactcgccggagctgttccgtgaattacagatcagtgagctggacacgctgattaccgatgcggcaggcacactgaaagtagtcgcactggcaccggaaaagccggaggcgctgaatgccatccgtcatctgaaacggcgcgggctgaatgtaatgctcggccacagtgccgccacctatgagcagactctggcggctctcgatgccggagctgacgggctggttcactgtttcaacggcatgaccggcctgcatcatcgcgagccgggcatggcaggagcaggactatccgacccgcgcgcctggctggaacttatcgctgacgggcatcatgtccacccggcagtgatgcggattgtctgtcagtgcgccgcacaccgcacggtgctgatcaccgatgccatgcgggcggccgggcagccggacggcatttatgatatctgcggccatgatgtcacgatgaaagcaggcattgtccggacggcctccggcggcctggcgggcagcaccctggcactggatgacgcggtcagccggatgattagtgataccggcacgctgccggaaaccgccatccgcatggcgtccctgcaaccggcacaactgctggggatcaccgcgacacacggcagtatctcggcgggaaaacgggcgcatttcaataacctgaacagtgactggcgggtaacacaaacctggatccacggacaaccggtacgctgatttcctttcattctgaggtgcggatctctccgcgcctttcttttccttatgtttatccaccgggtacttttacataacttactaataaacaatagcttaatcatttcacttgtggcgcaaatcacacttttcgttttcttttcattactgcattgatccttcgttttccttcctgtaaattgaaatgaaacctcaaaacgaaaccaactgaaaggtaatgacggatcgggtgatcttttgattcatttcactttcggctgaacgtcatgtaaaggatgaagctatgcacgaccctctttctgccgccacaccccactattccacctggacggaaacggagatccgccagcaacctgattgctggatgagtgcattacactcaatcgactcacaacgcgcacagctggatgcttttctggcaccgctgctggctcaggacaacctgtgcatcattctgaccggtgccggaacctccgcctttatcggcgagatgatttctcccgtactgcgccgcctgaacggcaaaagcgtcacggcgatcccgacaaccgatatcgtcaccaatccggcggattatctgcctgagcaacagccggtgctgctggtctcctttgcccgttccggtaacagcccggaaagtgttgccgcgtttgacctcgctaatcagtgtgttgcccgctgctctcatctggtgatcacctgtaataaagaggggcatctgtatcagcgcgtacagggaagtgataacggttttgctctgctgatgccgccgcagaccaatgacaaagcctttgccatgaccagcagcatcacttcaatgatgtgcagctgtctcgccgtcctcgccccgcagacgttcagcacagaccgttttgccgttgtggcgcagcgggcacgggatattctcgccgctcacggaaactgcggacaaatcctgccgggtaatgattcgtttaaacgcgtggtttacctcggcagcggcagcttccagggactggcgcgggaatccgctctcaaactgctggaactgaccgccgggcaaatcgccgccttttatgacacgccgaccggcttccgccacggcccgaaatctctggtcgacggcgacactctggtggttgtgtacatctcaaaccagccttacacccgtcagtatgatttggatttgctggccgaactgcgccgtgaccggatcgccaaacaggtggtcgcaatagccgatctgccggatgacgccatcagcgccgggacacactgctatctgcctgccggtgatgccctcagtgatacagaactgctgttctgtttcctgccgtatgcacagttatttgccctcagtcagtctgtcagaaccgggatcacaccggataccccgtctgccagcggcaccgttaaccgcgttgttcagggcgtgattattcaccccttcaataaccagaacacaggagcgtaatcatggggatcatctcaaccaaatatctgctcacacatgcacaggccaatggctatgcggttccggcgtttaatatccataacgccgaaactattcaggccattctggaagcctgtgcggaactgcgtgcaccggtgattctggcgggcacgccgggcacctttaaacacatcagcttcccggaaatttatgcactgtgtgacgcctattcccgctcgttttccatgccggtcgcgctgcatcttgaccaccacgaaactcttgacgatatccgcaccaaagtcggccagggcgtgcgcagtgccatgatcgacggcagtcattttccgtttgaggagaatgtcgcgctggtcaaatccgtggtggatttctgtcacagtcaggattgcagtgtggaagcggaactcggccgtctcggcggcgttgaggatgatatggatgtggatgcggaaagtgcctttctgacctccccggatgaagcgcgccgttttgcacaactgaccggcatcgacagcctggcagtggctatcggtaccgctcacggcctgtataccagccgtccgaaaattgattttgcccggctggaaaaaatccgcagtattacggatatcccgctggtgctgcacggcgcgagtgatgtgccggatgcggatgtccgccgcaccattgagctgggggtgtgcaaagtcaatgtcgccaccgagctgaaaatcgcctttgccggagcggtccgcgcctggtttgcggagaatccggacggcaacgatccgcgctattacatgcgggtcggtatggatgccatgaaagcggtggtccgcgataaaatcagggtctgtggtgcggaaggtcagcttctgtaacccgtcaggcggcactgtgttcccccgcagtgccgcctttttcatctgcgaaaaaataataaaaaaacaacaataaaaaatactgtcccgtaacaccccttaaccaataaattataaagaagctgaggagtactctacgatgtcgcaggaaaagtcgtttaaatccaaactctgggaattttttcaaagtctcgggaaaacctttatgtttcccgtctcgttactggcattcatggggttattactcgggataggcagttcggtcaccagtccttccgctatcagcagttttccgtttctcggtaatgaatttgttcagctgaccttcggctttatggcgatggtcggcggctttgcctttacctatctgccggtgatgtttgccatggctattccgttcggactggcaaaccgtaacaaagcggtcggcgcctttgccgggtttgtcggctatatgctgatgaacatgagcatcaactattacctgaccgtcacccaccagcttgccgacccggcgatgatgaagcaggtcggacagtctgttgtgctggggatccagaccctcgaaatgggcgtgctgggcgggattgtggtcggtgttatcacctatttcctgcatgagcggtttcaggatacggttctgcatgatgctttcgcgtttttcggcggcatccgttttgtgccgattatcaccgcgctgacgctgtcactggtcggcctcgcgatcccgttcctgtggaaatatgtcgccatgggcattgccgggatcggccatattattcagagcacagatgttttcggcccgttcctgtacggcgtcggcgtgctgctgctcaagccgttcgggctgcatcatattctgctggcgatggtgcgttttaccccggccgggggcacggaatttgttgacggttatgaagtcgccggggcactgaatattttttatgccgaactgaaagccggtctgccgttcagcccgcatgtcaccgcgttcctgtcacagggctttatgccgacctttatctttggtctgcctgcggtcgcttatgctatctaccgcaccgcgaaaccggagaaccgtccggtgatcaaagggttattactgtccggggtactggtttccgtcgtgaccggaatttccgagccgattgaattcctgttcctgtttatcgcaccggtgctctatatcttccacattattatgtccggtcttgccctgctggtgatggcactgctcggcgtgactatcgggaacactgacggcgggattctcgatctgctgatcttcggcatcatgcagggaacggccaccaaatggtatctggtgttcccggtcgggattatctggttcgctatctacttctttgtcttccgctggtacattctgaagcatgatgtcaaaacgccgggccgtgaagatgccgctgacggtgccgaacaggcggtgaaagccaatacaaaagcacgcggcaaagccaaatacgatcacaacctgatcctcaccgcactcggcggcaaagagaatattgattcgctggataactgtatcacccgtctgcgtctggtggtgaaagatatggacaaggtggatcagaaaaccctgaaagaagccggtgccctctctgtggtggtactggatgcccacagtgtgcaggtaattatcggcccgcaggtgcagagtgtgaaatccggcattgaagctttaatttaacaggaactgagcatgtacgattttgatgaaataattgagcgcaaaagtgaccgctgccggaaatgggatcatcagtatgtctgttcccgcttcggggaggtcccgcaggatttcattccgctgtggatagcggatatggatttcaaatccccgccggcggtgattgagcggttcacgcaggtggcacagcacggtaccttcggctacacctggtgctttgatgaattttacgatgcggtggtccgcttccaggcagagcgccatcaggtcacggttctgcgggagtgggtgacactcagttacggtacggtttccaccctgcactatctggtgcaggcattctgtcagccgggcgactgtgtgatgatgaatacaccggtgtatgatccgttcgcccatgctgtgacccggcagaatgttaccgtgctgaccaatccactggtggcgcgggataaccgctatcaccttgattttgaccatattgaggcgcagatgcgcgaacaccggccgaaagtctggctgttctgctcgccgcacaatccgtccggccgtatctggacggcggcggaaataaaacaggtctcggatttgtgtctgcaatacggtgtgctgctggtgattgatgaagtgcatgcggaacatgtgctgtatggcagcttcaccggctgtctgcgcccgggatgtgcagcgccggagaatctgatcctcctgacctcaccgaacaaagcctttaacctcggcgggctgaaaacctcttacagcatcattcccgacccggcactgcgggcacagttccgccgtcagctggagaaaaactccattacctcacctaatctgttcggggtatggggcattattgaggcttacaacaacagcacggactggctggatgagctgaacaactacctgagaggcaatgcggattatctgacacaggccgttgcagagcatttccctgactggcagatgatgcagccggaatcctcttacctcgcctgggtgaatatcagcgccaccggacgcacagcgacagaactgacactggattatgcccggcagaccggcgtggtggttgaggacggcagtcattatgtggcggatggtgaacagtatctgcggattaacttcggtacgccgcgcgcactgctggcggaagcggtaaatcgtctgaaaaacgcccggtaacagaaaaaaattggcgaccttgctgtattccgtcaacagggtcgccataattaccgatgttttaccttgtactgacaacacttaactgctctgatttgtcatgcgcactgcagtgaaagtccgttttcatcagagcatcggggcatgacacctgtccgctcttacttccttgtaacggtaaattccttttaccgttcccttcccggggtaaatccttttattacctgtgatgataaaacacaggctccctgataatacatccgtgtggtaagtccgtttacaccgggcaaccttgtccggtaacatccgtttatgtccccgcgggatatatccgttatcccgctaaatcattaaaaaataattcctttatttttttaagataataacgagtcagtcaggttatattcgcatccttgcgggcatattaacttataacactccggttataagaaacatctgtaataactgcattttttaatattttcagtgagatatctgaagattaatttacagttcacgccgggcgtgagttataaaacaacatcccgatacttaattaaaactgagaataataacgtaaacacaatttcaatttacatttaaaaaacacaaagaccaataagaaaatgctcagtttaaaacaaggaatatatttaccagaaagaaaataaacataactcagtccctattgaagttaaaaattatcatcataaaatatatcgtcaataagaaatggattagctttatgcgtaaatagcttgatttttcacctcattccttttattagtatttcttcttttgtttatgacataaaaaaatgatgaactatgcaaacacacaataaaacaccgcgttattaatacaaacagacaaaaaatccggacgagcatgtcatatgattattttgataaaatttaaggccaaattattttatatgatactgccgtatttttaggataatactcatctcatgaataatccgcaatttcatcaaaatacatacaacacattgattataaaaatcatatttataacctgactataccggaattatttaccctgaacaataacatgccgatgatataacaaaaaaaacaacatgaaaacattaatttacataataaatatcagcaaaataacgtaattcacttttacctttgccggtttatttaagataattgcacattcttaattagcattcataatttaataaactaatttctaatataattccattaacaaaaaatggaaatatcttatttaaataaaatttaattaacgcgatagtcactctgcagggtatctgcatctccttccggcgtaaaggttccggagggataccattatcactgccgtttcattatcaaaatgagatgatatcattctcatactgtacaaaccctgttcactctgcttttctcccgcccggctgaccggtacggaaagcctttcgcaaatccccggtgacacgtttcacaaatcgcagatgatttaagagatctctcacatttttatttctttgtcgcgccgctggttcagttattgctttattccctgtaccaaacgatccgctgaggccgacgtatgacctctcattccatttattataaaggagagaaggatgtcagatctcaatcatccaacctctgatctaatctatcagctggacgacaagcccccgtttttccaggcccttcttggtgcggtaacccatttattggccctgtttgttccgatggtgatgcctgccctgattgtgggcaaagccctggatttatccgccgataccacagcttatctggtttctatggttatgattgcctccggcatcggcacctggatacaggttaaccgctacgggccgatgggctccggcctgttatccattcagtccgtcaacttctcatttgtgactgccatgattgccatcggcaccgccatgcgcagtgacgggatccatgaagaactgattttgtcctctctgctcggcgtctctttcgccggtgctttcctggttgtcggttcctcttttgtgctgccttatctgcgccggataatcaccccgactgtcagcggcgtggtggtgctgatgatcggcctgagccttatcaaggtcgggattatcgacttcggcggcggtttctccgccaaatcagccggcacatacggcaactatgaaaatatcggtgtgggattactggtcctgctggtggtgatcggctttaactgctgcaagagcccgctgctgcggatgggcgggatcgccattgccctggtggcaggctacattgcctcgctgttcctcgggctggtggatttcagcacctatcagaacaccgcgtttattacggtgccggtgccgtttaaattcggcttctcatttaatttcacccacttcctggtggttgccattatttatatcctcagcgtgctggaagcggtcggcaacctgacggcgacagctatggtgtccaatcagccgattaaaggtgaggtgtaccagaaccggctgaaaggcggtgtaatggcggatggtgtggtgtccgttatcgcgtcagccctcggctcactgccgctgaccacctttgcccagaacaacggtgtgatccagatgaccggtgtggcttccagttatatcgggcgtttcattgctgtgatcctggtgttcctcggcctgttcccgagtatcggctggttctttaccaccattccggcaccggtactgggcggggcaatgacactgatgttctccatgattgccattgccgggctgcgcattattatctccaacggcctgcgccgccgcgaaaccctgattgtggcaacatccctgggtctcgggctgggtgtttcttatgacccgcagatcttcagcatcctgccgccgtctttatatattcttgccgagaacccgatttgtgtcggcggtctgacggcgattatcctgaatctgctgatccctgtcggacaaccgcgtggtgcggccaatgaagaagaaccggacatgctggctgacgagctggaagccatgctggatatcccggatgcagagcgtgatctgccggatatggccatgagtgcggagaacaaacgcgttatctgacccctctgatttctgcccgtaaaaaaaccgcgataatcattatcgcggttttgttttactgctctctgttatgcgttactgaccatcgcctgcggtgactgtgcctgttcatcgaacatactcagcatctcgcgggcggcctgacgaccggcagccatagcggtgaccaccagatccgcgccgtgcaccgcatcaccggaagcaaagattttcgggttggtggtctggttactcatgcggccgttgccgccggttttaatttgtccccatttatccagctggacattataaccgctgagccacggcatcggatgagactggaagccgaacgccataatcagcacatccgcatcaaggataaattcagagccttccactggtttcggacgacggcggccatccggccccggttcaccgagttgtgtgcggataagcccgataccgctgacggctccctgctcagtgcggtcaataaactgcggctgcacgttataaaggaattccacaccctcttcacgggcgttgatcacctctttcttcgagcccggcatactggcctcgtcacggcggtaggcgcagataacactctcagcaccacggcggacagcagtacggacacagtccatcgcagtatcaccgccgccgagcaccaccacttttttcccttccacatcaatccacggatattcatccgccaccggcaaccccatcacttcgcgggtactggcgatcaggaacggcagtgcctgcaccacgcccggggaatcttcatgttccagcccggctttcatcatgccgtaggtgccgacacccagcagtactgcatcatactcgctcatcaggcggctgaacgggatatctttgccgacttcacagttcagatggaaggtgatccccatatccgtgaaaatctgccgccgctgtgccatcagctgtttgtccagcttgaacggcgggatcccgaaggtcagcagtccgccgatttccggatggcgctcaaacacctcagctttcaccccggcacgggtcagcacatccgcacagcccagcccggccggtccggcaccgataatcgcgacacgttccggacgcggaaccacatcctccgccacagacggacgccagcccatctcaaaggcggtatctgtgatatagcgttcgatgttcccgacagtgaccgcgccgccgtggttacgcagcgtacagcggctttcacacaatctgtcctgcgggcagacacggccgcagatttccggcagcgaactggttgagttactcagctccgccgcctcaataattttgccttcacgcaccagacggacgaaatccggaatagcgttatgcagcgggcatgacaggttacacatcgccttttgtgagcagtacagacagcgctcactttcataaccggcacactgttcattcagcccgatatagatttcgccgaaatgatttttacgcagggccgcactctgtttctttgttccttcacgcggcggacgtttgaggatctcaaaacggatttccgactgacgcgcctggttgtatgcaccggtggctgcccgcatcaggcggtcattgcgcaggatcaccagtttgtgttcatccaggatgctgagtgcgctggtcgggcagttagccacacacgcgggcgacccgccggtggtatcacataaatcgcatttctgcgccagttcgtgcgagtgatcgaacgtcatcaccatttccatcgccccgaacgggcagaccagcacacagcttttacagccgatacatttttcctgatccagtttgactatattgtccgccacatacagggcatccaccgggcaggcagcggcacagggggagtcttcgcactggcggcaggtgacagcgaggctgtcactctctttgaacatgacacggatacggggggcgtaatcacggctgtcatgtggccagaggtgatcattatgcgcgacaacgcaggcaatttcgcaggcgtgacacccgatgcatttctggctgtccgcaactatacatttgttcatgttcacctatcgctttccgggttttcggtattggtaaccatgcaataaccgggcacattcggcccttctttgtcggttttatggtcattttgcggggcgggtcaaattctgcggatgcaggaaggcaataacacacgcgcaacagggctaccggattttttttactttaacggggagcgggatttgtttttttgacctgacgcggtcttaagcggaataaaaaaaattgaatcgtatcagctggtaacagacgcttcctttataaggaagcgtctgtaaataccggacattcatctgaaccggtcagacacccggtgccacggccagaccgataaacaatccggcaatagtggcactcatcaggttggataatgtcgccgccagcagtgcgcggatcccgacacgggcgatatcagatgcccgctccggcgcaaccgcactgaacgccccgaccactaccgcaatcgagccgaagttggcaaaaccgcataaggcaaaggagatcactgcaatcgttttggcatccagtgtgccgtcgtgtaaatgcggggagaaatccacataggccacgaactcgttgatcgccagtttttcgccgatcaggctgcctgccagcgcaatgtgctcactgctcacgcccatcagatacgccagcggtgagaaaatatagccgaacaggctttgcagactgacgccctcaaaacccataacgccgccgaggccgccaatcaggccgttaatcagggcaatcagcgccacaaacgccagcaccaccgttgccacgccgacagcaatcttcagcccgagcatcgcaccgcctgccgccgcctcaataatactggccggtcgtttttcactaaaggagatttcggtgaattccacggtggattcctgtgtcgccggacttaacatccgcgcaaacaggatcccgcccggaatcgccatcagagacgccgccagcagatattcaatcggcacacccagtccggcgtaacccaccagcattgacccggcaatggaggccatgccgctgcaaatcacggtgaataattcattgttattcatccggctgacaaagggtttcagtaccgccggtaactcattctgaccgaggaaaatggtggtcaccgcagcaaaggactcgatcttgctgattttcatggtcttctggaagacatacgccagaacgttgatcacccagcgcataatgccgaggtaatacaaaatcgcgatcagagaagtgataaagataatggccggtaaaacgcggaatgcgaagataaacccggctccgtcaaataacacgtccattttcggaccaaccaggctgccgaaaataaaggaactgcccgcgtcactgtaggcaataacgttgttcacacccgacgcgatggtctgaataaaccatttccccgccgggatatacagcatgatggcaccgagtgccacctgtaacagcagtgccgcgccgacagtgcgcagactgattttccgtttattcaccgaaaaaagaaatgctatcagtaataaaacgccgatccccgccaaactccgtaataaatccataatccggccccgtagttattatactcatcagttgtatgctgcaatgcccggtaaaggctgattgtgagatcagcaccttaccgggtcaggtatttcattcgttgttatgaccggtaaccggtcagccgcttacagttgctgataagcggaggcgatacgggcagccagtttcgcgttgttgaacaccagttcaatgttggagttaacactgttaccgccggtcagctctgccacacgggccagcaggaacggcgtgcttgctttgccgttaatgccctgctcatccgcttcgcgcacagcctgtgcgatcgcgctgttgatggtttcttccggcatggcaaactcatgcgggatcgggttggcaattaccatgccgccgttcagcccggtcgcccacttggcgtgcagtgcttttgccacggtttccggggtttccatgcggatagtgaccgggaattcgctttcacggcagaagaatgccggtaatttatccgtctgatagccgacaaccggtacgccgtaggtttccagatattctgtggtcagccccagatccaagatagatttggcacccgcacagacaaccgccacattggtttgtgccagttcctgtaaatctgctgagatatcaaaggtgtgttccgcaccacggtgcacaccgccgatcccgccggtggcaaaaacagcaatcccggccatttccgcgataatcatggtggaggcaacggtcgtcgcaccgtgaatgccctgtgcaatcacaaacggcaggtcgcggcggctcactttcatcaccttgtggccttctttgccgagcatctcaatctcatcatgagacagacccgctttcatgcggccgttaatgaccgcaatcgtagccgggatcgcaccgttgtcacggatacgctgttcaacttccagtgccattttcacgttgtccggatacggcatgccgtgagaaataatggtggattccagtgccacaaccggctttttctccgcgagcgcctgtgcaacctcaggggaaatatccagatattctgcgttcagttgttgagttttcatgcttgtgattccattagtttgtgaacactgtcttttgacagaccgggattatttgtcagctcgctggcgagcgtcagggcggagcagccctgggaaaaacggatactctgtgacagcggctcgccttcgagccagcagcgggcaaggcctgccatcatggcgtcaccggcaccggtcacattgacaatgtggacactgaacggcttcgaccagccgttttcaccgcccgcctcgctgtaataaacaccttcgccgcccatactcagggcaatgcgctgtaccccctgctcatgcagggcattggcggcacgcaccacatcctgtttgttttccactttgataccggtgagaatttccgcctcaaagcggttcggtttcagggtgtggatatgactgagccacggcttgattttgtttgctttgaacgcggaaacggtatcgacaaagaccggtacattgcccgcattggtaaacagccactccagcgcgccttctgacagattgcagtccgccaccagcacaccggcgtgccggatcaggtcgcgggaggttgccagtaacgccggggtcagtttttccaggatgcgcatgtcattgatcgcggtgatcatttcaccctgcggatccagcagtgacaggtaggtggaggtggtttccccgtgcaggcggtgcagattactgacattcacaccggccagttttgcctgctcatacagggtgttaccgtagaaatcatcaccgataacggagataaaatgagactcacagcccagcagggcaatattctgggcgatattgcgcccgaccccgccgggtgaacatttaatgtgaccgggattagaatcttcatacaccagattcaggtcagaataaccacaaacatccatattggctgaaccgacagtcaccacatagcggtgctcggagaggatgtatcctttacccttgatgtagcctttattcatcagattcatgatatgtccggccaccgcagagcggctgatacctaatacaccggccagttcctgctgcggaatgagcgggtcacgccggaggatctgaaggatttgtttttctcgactggtcataagcggacacttgttggttattaaacatgtgcttgttttattttttgtccgctacaaagtaaagcgctgaaataaagatttcgccggaatttaagggatgatcgtaaaatgaggagagtgcgttttcagcagaaaaaccggagggagatcatgttttttatatcttcaaaaataaaataaaaaacacaaaataataaccatcaaaaaaagaggatttaattaaaaataattttcatatctatcaatctgttatgtgcgggttgttatataagcaaacatctgtttgttttcatgaccttagaataacaacgctgaaatgcgccctttatcgttacataaataccgtgactaatatcaaataaataagcctgaaataaaaacaaaaaagacctgatgtttattgcggaaaatctgtttaatctggcttgctgaatcgcttattcttattttattttgaactgacacgattaatcaagctttatattcatctgttaatgaaataacaaaacagcccggaaacaatctctgtttccgggctgccggctttatattgctgtgcagctttgctgtcagtggtgcaacatttcgtgaacgatatcttttccgctcatcgtataaggataataggtcggccagttatccagttgagtcaggagtgcctcctgggactcattgcccatatacaggtggaaatgacccgctttttccggtgcaatgatatggtcgctgaactggatatatttcggtgcatgactgtttttatctttgcactcaaacagataacgtgcccctttcttgccggaagtgtaattcaggatccggtaaccggcatactgatactcacactgatccaccttatccccgcgatggaattcgatgatattattttcaataccaatcatatccacatcggttttatatccctttgtataataagcgcgatactcttctgccgttttatcgccgttcttcgcggctttcgcctgcatcaccgggtccagctcgccgctggccaggtaaggctcaacagactgccagacgccatcccagtcgctcagttgccggtctttgacatccttatcagcaaaaatcccttctgcggccttgcgctgtgcttctgtctgcggtttgtcgtgatggtgtccgtgtgctgctgccgcaccgctgaataatcccgccagtaacagtaacgggagaactgatttagctgtcataatcacccctgtacggctttaaaacgcgggttggacttacaaatcacatagatacggccgcgacgacggacaattttacagtccggatgacgctgtttcgcacttttcagtgaacttaatacctgcatcggtttttcctcttcttttaatgtacaaaacgcccgaagcgcttggcaaaacgggccacattcccttcctgagagtgtgttttctgtttgccggtatagaacggatgagaatgagatgagacatccagagtgacataaggataagtctgcccttcaaactcaatggttctttccgttctgatagtggatccgactttgaaatacacgtctgctgcggtgtcgtggaagatgactgtccggtaatccggatgaatatcgggtttcatggtcgcctcactttgttatgttataatataacaataatgatttttatcgcggttgaccactattttttaaccctgatttttatacgggaaaggagtacgatcgcggaaaaaaaggaaacataaatcagatcaaaaggatataaaaacgggcagccaccggtgaatacgggggctgcccgggagaagcacaacggtcaggaatcagctctctgccagaaagtccttatcctccagaacccgcagcggctcgatatcactctcttttttgataaccagagacggatccgaacgcaggcagacaccgccgtagtgaccgccgacggtaaaagcgcacatctggatatagcggcctgccactttcggtaaacaccagagctgctgataaacgttttcctgctcaccgaaacggccgcaggtttcatccagcacttcgtcgcggtgatccaccagcccgatattgctgccgcagcgtccggcgatcggtttaaccgcataaccggtccggcgcagttcgtcgctgagttcaaattctgtatccagcagataaggatgatgcgggaacagcgaccacaggatcggcagaatcgctttgttgcccgggatcaccgtccacagtggctcaaatacacggatttccgggcgcagcagcacatcaatcagccgcacatcatctccatgacgcggatggccggtacggataggcagtgcggagtatgtccggtcgctttcactttcctgacgcagttgttccagcgccgtttcccacgcccaggttttccagacacatttaagcacgcgcccttcaccgtcgatgacctgtccgctttcgttccagctcagttcatccagcccgtgaatgacccggtatccgtaccctgccgccgtgatggcccgcgccatattgagggcgtgataatcttcctcgctgtctttatcctgcataatatggataaacggcttggccgaggtgtgtttccagatatccgccagcatttctgacaggcgttcccccggatcccagccttcggtcagcccgccctgtttcgcccatttattaataatcaccccggtttctgcatgacaggaggcagaatccgcattgtattcatacactttcagaccgcgctcatccatgcagaaatccagccggccggtcaccatatcgtgacgccggttctgccaggagagccgcagtctcggccagaggatttccgggatattgaataatttaagcagattatcatctttcagcactttttccgtggcgtgcaggtacatcagatggacttcgttggttgcctgcatcagtgcattttcggcagtctctgaaatggtgaaatattcatgcggatccgcattcagattgtggccgtgattggctttgacataggctttttccatcggatccgattcatccagccatttaccggtgaaatcggctttctcatccagacgggcagcatgcagtgtcatcagcgcaggatccaccgccggctctgtccaggcatactcatcatcaattgtctggatcatccagccgaggatctgtgtatccgtgaaagtatctgacagggtgtaataaccgtctttgacatgcatcggcagctcgcgggtccactgctgaccgcgcggcagtttatggtggatgacgttctgctccacaatccggactttatccgcacacacctgggttatcaccgccacatgaccggtgcgtttaaattcgcccccttcctgccagataagcaatgcccccgctaccggcgcctgctggcatccgtttttaaacgcacgcagcggcagaatactgtcatccaccacatgacgcagaaaacgcagggaaaaaatctcgtacgccataccgacatcggtaaacaccacaccgtaattgagatacaggaagcggcgggcaaattccacacactgccatttgtatcccatatattcatttccgatataactgcggaaggaaatatcatcctctttctctgcttccgtgatggtatcgtagtcagaggaatagatagccacaccgccgggcgcatagcccagtaatgtgccgaaaggttcatgctccgtgatgattccactcatagtacggccttactgatatgatttagattgccaataattgtgcttactgataatccagtatacgcccgtccataaaaaaacaccgatgcttttctgcatcggtgtcaatcaccactccgggttatgcttagtgagtcagatcacgttgccgggctttcttttttcggatgataaccattaaagaacaggttcaggatcaccgcactgacagtggccagcaggatcccgctgtgcagcagcggctgtaagaacatcggcagtttggcaaagaaattaccggaaagtgtcggtgtcagcccgacccccaggcttatcgccacaatatagagattgtaattattgccactgtaatcaacacgggacagaatgcggatccctgtcgccagtaccatgccgaacatcaccagccccgccccgccgagcacaaactgcggaatagaggcaatcaccaccgccattttcggcagcagaccaaagatgatcaggataaatccggagactacacacacccagcggctgtggacttttgtcacgcccaccagcccgacgttctgggaaaatgaggtatgcgggaaactattgaacagaccaccgataactgtcccgatcccgtccacccgcagtccgcgcacaatgtcatcttttccgaccggacggccgacgatttccccgagcgccaggaacatccccatcgattcaataaagacaatcagcagcaccacactgagggtgataatggaaatcggctcaaacgttggtgttcccagcgccatcggggtaaccagtttgaaccagggcgcatccgcatagccgtcgaaactgacctcattgcacatcagcgacaacacaaaaccaaagataatccccagtaataccgagatattacagagaaaacccttacagaatttggtgataaacaggatagacagcagaaccgcaaatgagataccgaggtagagcggatgaccatattccgggttacctttacccccggcagcccagtcgatccccacctgcatgatactcagcccgatagaggtgatcacaataccggtgaccatattggggaaaagcggcatcagttttcccatcagcgggactatcagcgttgtcagtacccccgccgcaatggtggcgccgaaaatccccatcaggccgatatccgggttggcaccgatagccagcatcggcgtcaccgccgcgaacgtcacagacataatcaccggcagacggataccggcaaatttcccgataccaatacactgcaacagtgtcacgataccacagcaaaacagatccgaactgataagcagtgtcaccacttccttgctcagccccagccggtcaccgataaccagcggtaccgctactgcaccggcatacatcaccagtacgtgctgtaatcccagcatcatcagttttcccgcaggtaatatttcttcaacttcgtcaataacgggcttaaccggttcctgtgcttgatccacactatgattgctcatgaaacagactcccttacaaccgggactccccggcttcgattcgaagatctcggaaaatgacccctggcgtcagggtgtctcactatgatgacgaacccagcctgggtatctgttcatcatttaaacgattgagcaaaattcagaccagcgcgattttttatcagcataaatgctgtgtttcgtgaccggattccggttttttgacgaattttgccattaaaaacgagatacccgccgcatttttattacccctgtgaaatgtaatttttcaggactcacggcatgacaatcgattgccttctcaatttaataatcccggttatcacattgatagccgtgtatcaccgtatatttcaccggaaccggcagcccgggagcccggcccccctgctcctcattgcggacacgcgccagaaactcaccgacagccggttcatcatagtctcccggccactgatactgttcatacccgttgttattaaactgaaaccggggtttcaggagaactgattcccgcagcggagagtaatatcgttatccgggaacaccagaaaataatatttgataccatactcaggtgtctgattatccatttatccgcaacctttatgtacagaaccacacatttatcatcacagagaaaactgaaagcaccgagataaaacgcgtctttcttttctgataccgggacaacaaagtaccatgggatttgctttgtaatcactctattgttaagcgattgattgatatttaattggcttcactggcggctaatacgctgaattacttgattacctttaattttatttcttcccgaaccattttccaaccctgaaaaaattgtctttattttcataataagcagccatttatcaatataagaaaatcgctctgataattaacagaaaaacctcacaattaaataagaaactgaatactcttacttataaatatctattgtttaaatatccgccggacacttaaagtttttcagtattttattaaccggcttttctttataatttaattcgttgatatttatattgagctttttccatccagtgcagcagcgcccattcgcccatatctgaaccattaaatattggtaatgatcatgctatcggagcagtaactgagccaggatgcaaagcctgcataacctgccgggattccgttcgcggttttacaaatctcacagacggacgggatgctgtctcatatatagcttcggcacaggcttccgtcacaatcgtcactgatgaacatcccgttaaaaattcaatcagtttggttcgcgtgaattttttgtgcaacaacgctttgcatgatggcctctcctgaaagaaaaacaccctgtcagcataccgctcacagggcgggggggatcatctcattaaccgcccgcaggcgggcggctaaaggatattgcagcaaataaccggatcgattattttttgtttttaaaatcaatgaccatacggccggtaaatttgccctgctccatctcttcaaagatggcattaatgtcttcaagcgggcgcatcgccacttttggtaccactttgccttcggcaccaaaacggaatgcttctttcagatcttcgcgggttcccaccagcgaaccgacaacctcgataccgtccagtaccagacgcggaatactcagatccatggtttccaccggcagaccgaccgccacaacacgccctgcggcacggacactgccgaccgccgagttaaatgcggatttggctactgcggtaacgaccgctgcatgcgcgccgccgaggtctttctgaatgatttcatcgacattatcggttttcggattcaggatcagatcggcgcccatctcttttgccagtgccagttgtttatcattgacatcaatagcgatcactttggcattaaagacgtttttggcatattgcagcgccaggttgcctaatccaccgagaccgtaaatcgccagccactgacccggtttgatgccggaaactttaattgctttataagtggtgacaccggcgcaggtaatactgctcgccgcggctgaatccagaccatccggcacttttaccgcataatccgcagtcacaatgcactcttccgccataccgccgtccacggtataaccggcatttttaacttcacggcagaaagtttctttgccgctgttacagtattcacaatggccgcagccacggaaaaaccatgcaacactggcacgatcgccgactttcagtgaggtgaccccttccgcgatttccgtcaccacaccaataccttcatgcccgaggatcacaccggagacatcaccaaaatcagcattttttacatgcaggtcagtgtgacacacgccgcagcattccattttcagcagggcttctccatatttcagagggcgtaatgttttctctttgatttctacggtcttattttttgcgacaacagctgctttcatagttcacctcagttatggaacaacagaaaagttatgttcagttcagcaacataacgaccattaactggtttattctagcgtgaaatacgggataatactgcactctgaatgccaatcatttcaactatcattaataagaattattgcattcagagtgtatcagctattgcctgttacaggcgggatgcgggatacgatggtgcgggcagcggctcgcgggggtcattttcaacagtaccgaaccggatatcgccattgttccagtcactgacagcctgctgcagtgtctgtacgtcgtagccgacaaaattccaccacatcattatccgttcctgcaccggtgtaccgcccagcaacagcaaccgcgagcccttcatcagtgtcagtgtgacagaggacaacccttcaccgacatacaccagctcattggcggtataaacttcaccgcggtatgtcagttggccctccagcacaaagaagccgtattcgaagtccggccgggtatcgagtgtggtttgtgttgcctgctgtgccagcaaatccatgccgatcagcggggaaaaatgcagaaccggcgaacggtgatcaccatattcgccggtcagtaatgtgaaactcacctggtcatgatgccagacaggtaaatcaggatagtggtcaaagcgcggcgcgatggtgctgtccgccggaggtaaggcaatccagagctgggcggcatgcagacgggcatttctgccggcggaatcttcggtatgtgtgataccgcgtccggctgtcatcagattcacctgtcccgggcggataatctgctctgatccgaggctgtcccggtgcagcacctcaccttccagcatccaggtgaacgtctgtaagccgatgtgcggatgcggcccgactttcatgccgtcatcccctttgaaaactgccggaccggcatgatccagaaaacaccaggcacctatctgacggcgctcttttaccggtaatgcacgggataccggcacgccgccgacatctttaatccgcgcgctgatacgctggggtaagacctcttgtctgtctgtcatggtgtcacctgccttgtcagtgagagagtaccgtcagcaagcggacggctgccttaaggtatcagtatactgttaagcattcacatgacaaataaagagaaagccccgcatatcacactgtgatatgcggggctgactgacaggatcagcgctcacgcagggcttcgttggcccggttcagcggtttgaccagataaatacaacagattccggatattctgcataaaattcagaaaatgccacaagagttgtagtactaacggtaatataaaatacatatccggagattattatttccggttatattttcgtagctttatttattgtttttcccgccaagagaaataatgcggtccgctgactcaatcgtcgactcgcggtgcgcaataataatccgcgtgatcggcagttggcggatcgcctgattgacgtaagattcactctctttatccagtgcgctggtggcctcgtccataaacagaatgcggggcttgcggtacagggcgcgggcaataaagatccgctgtttctgcccgccggacagtccttcgcccagctctcctatcagcgtttcatagcccatcggcatcgatataatcacgttgtgaatataactggcctgtgcacaggcgatcatcagctgctcgtcgggattttcggtgaacccgcagatattttcgcggatcgagccggaaaacagtttgtcgtcctgcatcacacaggcgatcattttgtggtagttattgacgccgagctggcggatctcaatgttatcaatgaataccttgccatccgatggctcaaacaggccgcacagcactttcatcagcgtggtttttcccgagccggacggccctgttatcgccacactttcaccgggggcaaccgacagattaatatcgcggaagatcggtacggactggctgtcgtaactgtacgccaggttgcgggtctccagcccggcggcctgcatctgcggctcgtacggtacatccggctttttattttcctgctcgttgagcgcgatatcggaaatacgctcgttgtgcaggctcatgatgcgcagctgcagcaggaactcaatgatggaggcagcgcggtcggaaaactgctcgcggtaggcgctgaacgcgacaaacatcccgagggtcatggcgttgtcgatcaccagacctgcgccgatccacaggatggctatctggtcacaggccataataaaaatattcaccccgccgaacatcaggttcatcttggtcaggcggatgccggtattgatggaatcgactttcagattcagccagtgattcccccggcgatcgctcatgccctgggttttcaccgtggtgatgccgtagagggattccataaagtacgacccggcgcgcgcctctttgatcagcgattcctctgacagctggcggtaataacggtaggtcgccagccgcagcccgatatatacggcggtaaacccgagcacaatccaggtgagatggccgccgtagaggatcatcatgataaacacgccgatcagcatgataccgtccatgatcgccccgaccacgctggtggtaaaggtggtacgcagaatatccagcgagccgaaacgggactgaatatccccgagtttgcgccgctcaaaatagctgagcggcagccgcagcagatgggtgaataatccggactgccactggacgttgatcagcgtttccataatcacactggcccaggcgcggcacatactgaccgctgctttcagcagaataaagaacagtaacccgacacaaatcagggacagtaacccctgatctccggcaggaatagcatggtccatcaccagctgtgtgccgaccggcataatcaggccgatagcctcaatcaccacggagaacgcgaagattttcagcagcgcttttttcagcccgtgaatattgccgatcagcttgcgcaggctgagttttttcaccacctcctgcctggtgaaggtgctgccgggccaggcttccagcgccacgccggtaaaattgcgcgacatttcctcaataccgaccacccggcggccataggccgggtcatgcaggataaatttgttgccgctgattttcaccagcaccagaaagtgattgaaatcccagtgtaaaatacacggcagacgcagattgggcaggtcgtccatatccagtgacagcgcgcgggtggtcatgcccagttcggcggccatgccggtcagtccggccagggtcgcgccccgcgcggagagattgaactgctggcgcagggaaatcagatcgatacttttgccgtaatgggcggaaatcatggccaggctggcgaggccgcactcagaggactcggtctggtggatcaccggaatgcgctgacgcagactgagatcgagtttttccagcaggtttttcagggataaacggcgcatacagcctcccggtcagataacagcgtccgttctgtcatggtgtgtctgctcctgttggcccggaggcgctctgtttcatgtcatagaatggcgataccatccactgatagattttgcgtttttccagaaacagggtggtattggctttcatgccgttttgcaggctgagttcgcggccgtcataggcgatcatctgtttttccggacgtacaatcactttgtaataggggatggactgcggcatctgactgactttcggcgccccggcataggtcatcatttcctgtgcagaggcaggggttttggaaatcacctgaatggtggcggcaaactggccgaatttttctgccgggaaagcttcataacggatattcaccgcgtcaccgacattcagataaggcagtgcgtcattgggcacccagagcgccagccagtactgacggatattttccggcaggatctgcagcagggtatcaccgggattgaccatctgaccgacggtcacgccaagggaatccacacggccgtctgtcagggcacgaacgataatctcaccacccgcgtcattattcacctgctctttcatcagctcagactgttgtaattccagctgataaatccggttatcaaattctgccgcctgagtcaggatctggctttccagagacgtaacctgcagaatattctgttcattctgtccgcttaatcccagcagactgttttgctgagaataataaagcgcagcctgattcagccactgatctttatttatcagcccgctttcccggtaatgatgataattatccatattctgcttcataatgcggatcccttcctgtgcccgttcaataatcccggcagatcgcaactgtgcctgtgcataaagggacttttgtttttcgagcaaggccagagtggtctgtttgttatctctgagacgggcggtcatatcacggatatgctgtaactgattttcaatttcacggcgctgattttcactgaccacaccgctggctgtggctctgctggtatcaatacggtaaaccggatcccctttgcggataatctgcccttcattcacatattgcccggtaataaatccctgcacacctgcatatacagtaacagcccggggattggtggtgatttctccggtcacactgacccgccgcgtatagctgccggacaagataaaggtcagaaaaaccattaaaaacagaaaactgcatactataatcagccacagcggaataccgggtaataataaggccttaccccgccatttcatttttcggttatcgagtgcggctttgcggaacacaataaaccctgcctgcggttatccggtgaataaaaggccgtcagtatcagggaaaagataaaaaaacgggaattcataaaataatgaattccctcaaaatatgatattgactgcggaacagtcaataatgcgggttatagtattaattaaccggcaccagaaactgcttcaatttccagaatacttaactctttcatatttagatttccctttcattatttatgacttcgtctgaacatagtcatcacggtacttattttagatgaattgactgctgataatgaacagagggaaggatgtaataaaaatcaatcgttgttacagcggaaaataatatagttaatatactgacagaaaataattattatttatcagctcaacaggaaaaactgcaattccacatcacttttcaagtatatattttcttaagaaattatactatattgtcgtaaaatattcaggttttgttatgaatcaaaataacattcctgctctgtcgtcagccgggaaaaacaccggcgattccgatgataactatttatatatcaaggatcctctgtggtatattccgcagaggatcaccatttatactattactttatcagcgtattatttacaaataccaccgagatctacaatgccgcctaatttatcttcaataaaaccgccgacagccgaacccactttcccgccgacttccctgcccagccccgggtatgcgtctttgaggctgactttaccgaacaccggcaggtctgccgtcagataaggcccgagcagttcaaaaccccagtcaccgagtttttttccgaggtcggtgatagtgtcctgaacacatccggcaccggaaaccagttcaatttcagcatgacttaattctttcattatcaatccttttaataatcagttattttatctgaataataaaataatctttaaaataacaaataaaattattattttagaattatctattattcatccgatatcctactgattattttaatgaagagataaaccaatatttattactccgatatctgaaatccgccaccagtgcagccatgcattccgcctgtaacgcataagaaagcatggttgatttcactttccgcacaggttgccggagtttcagatgaaaataatgccagcagagtactgatatcatcatgctgcgggtgttgctctgacatcagcagtgctttgccggagactgaaatcgtaacgctgttaccgttcctttctgaccatcgcccggcaggtttttatctgatataaagataaaccaataccttatttaagcatcaaaaattccatataaataaaaaacccgtcatatgacgggttttcggtaacgggcagttattttttattgttgtgagcgcatatccatgatcatttttccgtcatagtctgcaccaacaacaatattaggcacttcacctttgtatttctctgctttaatttgttctatttcaagctgcttccagttaatcatttcgcgggtgattgtctgctgtaacacggcgttcgcttctgattctttctgagcggcatataaacgtgcatcggcttcctgacgcattgcataagagctggcctgggcattacgctcacgggcaagtgcctgctgttctgcggactcacgctctgcctgtgcgataaccacttttttctgagccagttcacgctctttctctgcttccgcttttgcctggtttatctgctcctgacgcatcttggtattcacaacctgctcctgaaccacttccggcagcgtaatatcctggatcataatctctttgatcgtatagccgtaaggtgaagcataaccctgaatggcatcacggatagattcctgtaatttccgctgggtatctgcggtatacagatcctgtgcgttggcaacatctttcccgaattccagaatcgtggaaatcagtttctggcggacatatttatccagtgcttcactttctgtaccgccgttaatacggagaatgggggctttagcgccatcgaactggagcattaccgtaatatccacgatggatttcagtttgtcctgtgagggtacacgtaactctttcagtgatacgcggatatcttttgttgaataagtatcaaatgtcataaacgggttaatcggaaaatgcagcccggcatcataagcgaccgggttgaccttacctaaaaaggttccgacttttaccgaaccatcctgcacaatagtatacgaattaaaagtaaccactcccgcgacgaggagaataacggcaacaataatcaattttataactgacttcagtttgaccggatttactgcctgcatcatttgcatgtctcatccctataagataattcttagttaatgtcgtttttataaatactgctttatgtattagtcatatctttttacatcgctattattcataaaatacagaaatgagcaaatgcagcccgtcagacgaataatgataataatctgtgataccggatgccccggatacggccgtgatgattatgccttcagaaggggaaatacatgtcattaatactgcttccggtataaaaacagggaaatataacgttaacagcacgtttattgacggaagaagacaatccgggacaatattccgggaacagcagttatggtatattcatggcagcgataatacatctatcgctgataagtgattatgagtagtatgtaagagcacttaatagtgctgactttgtaaaccggacacccggcggaagggttctgccggatgttcttttacggatactgcgggtcagacaatattaattattcacatcaacaacgacacggccgcggatttcaccgttcagtaagctgtgtgccgccggaatcgcttcatttaacgggatcacacggctgatagtttccagctgtgccggatcagtcagttcagccagttgtttccatgccgccacacgatctgcctgcgggcgcatcacactgtcgataccgatcaggctcacgcctctgaggataaacggtgcaacagtcccgttaaaatccatgccctgtgccaggccgcaggccgccacaacgccaccatactgagtaccggcacagacaccggccagtgtgtggctgcccacactgtcaatcgccgccgcccagcgctctttggtcagtggtttacccggtacggataactcgttgcgatccatgatttcagatgcgcccagggtatctatcagatacgcggtatcagccgtacggccggtggaagcgataacctcaaaacctaattttgacagcagagaaacagcgaagctgcccacgccgccgctggcaccggtcaccagtactttaccggattctttggtgatcccctgtttcagcagtgcctgaaccgccagcattgccgtgtaaccggcggtaccgatcatcatcgcctgctttgtactcatcccggccggtaacggtgtcagccagctgtctttcacttttgccacctgagacagtccgccccagtatttttcaccgacactccagccgttgagcagtactttgtcgccaactttatagtgttcagagctgctttcggtcacggtaccggcaaaatcaatccccggaaccatcgggaaactgcgcacaaccgggcttttgccggtaatcgccaggccatctttatagttcagcgtggagtagtcaatctgcacagtcacattgtgatccggcagttgtgattcatcgagctgagccagctttgcggtatagccgtcagtattttcaatcagaatgcagttaaacatggtgttatccttttatgaatatagaccagttgtctggttaattgtaaaaaaatttattaaatactcaccgacgtgttaacaacggcgatatttaataaattattctgcaacaatctctcaggctttctcagccagtatctgcgtcataaaaacagtgataaacagatccagcggttcactgttgcgggtcagtttggcacgcattaccgccccttcccagcccgtccagaaaaaagccgccatttgcctgcaatctgttttagcggaaataagctgctgtttctgtgcttcaagaaggcagatttccactttcttctgccagccggtaataatctcatcgagtatttcacaataccccgccggcaggctggtcacttcctgaccgagattccccaccagacacccgcgctgccagtggtatttttccatcccggctttggcggtcagataaaatgcccgtaacctttccggtggcggcagcgtgatatcagacaaacatttatccagcagacgggaaaaatagctgtcgtaattacgcatgatttccagaccaaactgctctttactgtcaaagtaataataaaaagagcccttcggtacaccgacctttttcaggatcccgttgatatccgatgtcatataccctttttcggtaaacatctccatgccgctgcggatcagcattttttttacatccgcacccgcatcatgatttttcggcggccgtccccgtttcggttttgtgattactgatgtcattgcgtctttacctctgtcatgcggaataatatagaccagttgtctggtaaataccatgcttttttatccggggaatttccggcaccggtttattcgcagataaaggtaaaatcgactttgccgtcagcactgccttctgtgacaaaatcattgctgtaacggatatcgcgggcaaagaaagggaaaatttacatttttacatcgtgactaccaatcactatctgaccatcttccttgataaattcactttgttgctgattaggcaatatatctaacactacctctgaaggcctacacaactttacgcccagcggagtgacgacaatcggcctattaatcagtatcgggtagtgcaacataaaatcgatcaattgctcatcggaataaaggttattttctaaatttaattgcttatacggctcaacattttttcgtaatagctccctcgctgtaattttcatatctgcaataagttgcactaacacatccttagccggaggtgtttccagataataaataatcgttggctcaacgccactattgcggatcattgcaagggtgttacgcgaagtgccacaattggggttatggtagatagtgatctcattcatggagttacctttaatttaacagtgaaagtcgaagtactaaagcaacgagtgtgacaatgagcacagggatagtcatgataatcccggttttgaaataatatccccatgtaatggtcatgtttttttgcgataaaacatgcagccacagcaatgtagccaaactacctattggtgtgattttcggacccaaatcggcaccaatcacgttagcataaaccattgcttgctgaattaaccctgatgcttcacttccttcaatggacagggcaccaattaataccgttggcatattattcattattgaggataaaaatgcagttataaatcccgtaccaattgttgcaacccataaccctttgtctgcaaggtaattgagcgtttcagaaagataatcggttaaccctgcatttcttaaaccataaacaaccaagtacatacctaaagagaaaatgacgatttgccacggtgctccgcgtaatacttttttggtattaatcgtatggcctctggctgcaattacccaaagaattaaagcgccaatagccgcaattgcactgattggaatacctaatggttctaagacaaagaaaccaataagcagcagtaccaataccagccaacctgttttaaacgttgtcatatccttaatggctaaagtcggttcactcagtttggtaacatcatattgtttaggaatatctttgcggaaaaaccaatgcagcatcgctaatgttgcaataattgctgcaatatccactggcaccataatcgatgcatattcagtaaatccaatattaaagaagtctgcagaaacgatattcacgaggttcgaaacgatcagcggcaagctcgccgtatctgcaataaacccggcagccatgacaaatgctaatgtcgtgcctttgttgaaaccaagtgccaataacatcgcaatcacaatgggcgttaatatcaatgctgcgccatcattggcaaataaggctgcaaccgttgctccaagtaacacaatataactgaataacagttttcctttacccccgccccacttggcaacatgtaatgcagcccattcaaagaaaccactttcatctaaaagtagactaatgataattacggcaacaaatgtcgccgtggcattccaaacaatgttccagacaatcgggatgtcctggaaactgatcacaccaaagatcagtgccaatacagcccctgctgtagcactccagccaataccaagtcctttgggttgccaaataacaaaggtgatcgttaaaataaaaatgaatgcggcaataaacataacaacctcatttaaaaggtacttttccgcaccttttatttttagaaaataaaacttattctgcgagctgacttaatgcagatatccccacaggctctgtttcaagcaaaggaacaatagcaacacgttttgccaatgttgatgtcaccttttcaatctgagcgacttcctgttctgctcttgaaagtaacaatggtgatattgtttccgtgatagacagactgttattgatcacccacgcccacggatgtatatctgcccgaattaaatcattttgtaagttctccgcctcaagcacaggcgtagtttcagcgagtgtcgtaataataactttagtgcgttcaggatcttgtaattgcatcatcggcgttaaatagtggcctttttcgcccatttttttaacaatttctttatggtatgcccctgttgcatccagaagtaataatgtatgcccggtcggtgcagtatccatgacgacaaaacgtttacccgcgtctctaatgatgcgagagaaagcctgaaataccgcgatttcttctgtgcatggagagcgtaaatcttcctcaagtaatgcacgcccctcttcatctaaatctttccctttggtttctaagacataattacgataacgctcagtttcagcgacagggtcaattcggctaacctgaagattgggtaaaacaccatcgagggttgattcaatatgcgcggccggatcagatgtggtcagatgtacatcaagccctttttctgccaatttaactgcgattgatgccgcaatcgttgttttccctacaccacctttgcccattaacataatcagcccatgctgttgctgagatatttcaccaaccagttctgacaaggtaggtaaagaaataggttgttttgtaggggtaatagttggaatttgtggcatgtcatcagataacaactgcttcagtgcatcgacacccaccatattgatattttgtaaataaagaatatcgacaggtaacgagcgtagtgcttccggcatagactctgatgccgcttgttcacgagagtagagcgcatgggataacttatcattttcagtcaccgccgtttcagggaaaacaccattgacaaccaattgctgatttttgatacccagagatgacaactcgctataggttctcgcgacttccctcaatgcggcagactgaggtcgtgcaaccaagaccagccttgtcagtgatttatcactcaacgcttccaccgccatgctgtactgctcacgttgtttatcaagaccagacattggccctaaacatgacgcgccatcaggattgttactaataaaatcactccatgcactcgggagttgtaataaacggatggtatgccccgttggtgcggtatcaaaaatgatatggtcaaattgctctgtaatttcggtattggttaacaacccggtaaattcatcgaaagctgcaatctctgtggtacaggcacctgatagctgttccgtaatactttgaattaccgcttcaggtaaactttctttgattggattaataattttgtttcgatattcttcggctgcggcttgaggatctatttcaatagcaaatagatttggaaccaatgttattggcttaatattgttgcctatcgattgagagaatacttgcccaacgttagaagctggatcagtgctcaccagtaaaacttttttccctttttcagccaacttaattgctgtcgcacaggaaacagaggttttacccacaccaccttttccagtaaaaaataaataattaggtgtgttatctaaaaatttcattttattgctcctgttaacaacacgttttaccattaccacaacacgatttaacaatttcagctttttcaatattcggtcgaataccaaaccatctggcgagctcatgtcgttttgggtatcgaccagccagcacaatctcaccgtcaagaatcaatagcggaagtgacccggcacctgcggtttccaaaaatgtttttgcttttgtgttgttaacgaactccataggctcttgcgctaaattaaaacgccttatacttgctccttgtttttttaaccaatccacatctgttgcgaagtctaccaatgcttgatcgacttcggttccgcaaacaccggtgctacagcataatgcgggatcaaatacttctagttttttcatcgctcaaccttacatatgtttttccaaatatgttagcttaaaaatttttatacagaacagctacccgcaggttcttttgtctccaagctcttaagcaaatctgcaactctatttttctctgtggcgtaagtgacatcaatgatacttttcacccacggtagtaatgcaggagataaacgataatgaacccatttgccatgttttgaatcgagcaaaagacctgattctcttagcattgccagatgccgggatgtctttggttgcgataaattcaaggccgtatagatatcacagacacataactccccggatgcttttagcaatagcacgatatccagtctggtttggtcacctaaaattttaaacagttgtaatggttccatgtgtacctctttaatcttttttttaaattacctctaaaaaacacatgcgtcaaatcgaatatgtttcccataaactattattgtaaccgccagtatttagaaccattagcatgcacataaaggtgcattccttcaccgtcagttagtttgtatcctttatcggcaggctttgccgttcttaccttcacatctgttagtgccgtataggaactcccatgagtttgtgttggtataagaattcattgaacctgtatgtaccaacgcatatgccaacaaatattacttgatttaggttgatataggtggatgtcagttgaacgaagaaaagttaaaatcagctaattaactgaatttcagacataaaaaaagacatcggttgatgtccattgacttcggaatggtacgccctacaggattcgaacctgtgacctacggcttagaaggccgttgctctatccagctgagctaagggcgcgctgaggaaaaaaacagcgggttaactgcttgatgcaccgtggattatacggctgcgacgcggcgagtcaatcagaaaatcagttatcttcggcagttactttctgacaccttaataaaacataactgacagacggaaaatgttctgacagaatagtgcccatcttttatctgttttatggatttttacacgatgtcagcaaaaattatagacgggaaaacgattgcgtcgaccatacgtgccgaagttgccgcaaaagttcagcaacggattgccagcggaaaacgggctcccggtcttgccgttatcctggtcggtgagaaccccgcgtcgcagatttatgtcgccagcaaacgccgttcatgtgaagaagtcggatttatttcacgctcttatgacctccccgataccaccagcgaagccgaactcctccatctcattgatgaactgaataatgataatactatcgacgggatcctcgttcagcttccgctgcctgccggcattgataatgtcaaagtgattgaacgcattcatcctgataaagacgtcgacggttttcatccttataatatcggccgcctgtgtcagcgtgcgccgaatctgcgcccgtgcacaccgcgcggtattgtgacactgcttgagcgctgcaatatcaatacatttggtctgaatgccgtgattatcggcgcatccaatattgtcggccgcccgatgagcctggagctgctgctggccggttgcaccacaactgtcactcaccgctttaccaccaatctgcgtcaccatgttgaacacgcggatttgctgattgtggcggtcgggaaaccgaattttattccgggtgagtggatcaaacccggcgcaattgtgattgatgtgggcattaaccgtctggaaaacggcaaagtggtcggcgatgtgaattttgccgaagccgctgaacgtgcggagtggataaccccggtgccgggcggtgtcgggccgatgacggtcgccacactgattcagaatacattacaggcctgcgaagaatttcacgataaggacgagtaacaatggatatttttaatcttgacggccatccgcatgttgagctgtgcgacctgctcaaaattcagggctgggccgacagcggtgccgccgccaaacaatttatcgctgatggtcaggtgactgttgacggtgaaacggaaacccgcaagcgctgcaaaatcaccgccggtaaagtggtggaatttgccggtgagcaggtaaaggtggctgaataatcgtaatctgcgaataaaccagagcactgcctctggtttttttatccgtataataagagccgcaaaaaatgaaaacacaaaaatttcagcctgtgcagattgccctgcactggtttattttcctgcttgtgattgtcgtttatatcagcgccctgttacgggacaatgctgacgaaccactgagaagtattttggccgggctgcattacagttgcggtatcgctgtcggtatactgatgattgtccggctggccgtcagaataaagcaccgcgcaccggctattattcctaaaccgtcaccgatgataaccggtttatcccatctggtgcacctgataatctttgtgatattcattctgctaccggtgcttggtttcagtattaaatatctgaacggttatgactggtcagtattcggtatcccgatgccggtctccgccgcaccggacgaagatctcgcgtacagcatacagaatattcatgagatcattgccaataccggttattttattatcggcctgcatgccgccgccgcactggcacatcactatttctggaaagataataccctgctgcgcatgatgccgcgtaaacgggactgattatccgccgctgaataacaaaacgctcggcaatcattccgggcgtttttaatacggaaaatggtatttatatcagttgttaacggtatttcttgtggtattcaccacgggtggctttaaattgttcagccatggctttcgcttccggaattttaccttcttccgtcagcttcagtgcttcatcaatttgtccggtcagaacatcataaccgtgatggtaatccttcacttctgcgctgtccgccgctttacctttcagtttggccggtaattcttctctggcactctgtgccgcagcacgcatgtcggtcagtgcagttttcagcgctgccgcgtcatctgttttttcaacaatctgcagattcgcgttcagcgttttcatattatctgacagtccggcggcagatgccgtcattgcgccgaatgcacagacagatgccaccagcatagctaacatatttttactcatcagatgcttcctttatttttaatataaaagtacgacaaagacatcacacaataaagcaggtgctgtaacagaatagcggataaccggcggttatgcctgcccggtaaaaataaaataatataaaaaaacccggcagtgaataatgccgggcttttcagtcagaatgtaataacgattacttacggcgccaggtggtaccctgcgggccatcttccagcacaatacccatgtcggttaaagcatcacgggccgcatcggccagcgcccactcttttgacgcgcgggcatcattgcgctgtttgatcagtgcttcgattttcgctgcatcctcatcactttcactctgcgcaccgctttgcaggaactgctccggatcctgagtcagcagccccagcacaccggccagctggcgcagttgtgctgccaggccgtttgctgcagtcatatcttcctgtttcagacggttcagttcacgcgccatatcaaacagcacagagtaagcttccggcgtgttaaaatcatcatccatcgcatcgcggaaacgatttgcgaattcctcattcaccacgaccgccgcatctttatctgtgccgcgcagtgcggtatagaaacgctccagagcagtacgcgcctgtttcaggttctcttctgtgtagttgagctggctgcggtaatgtgcggacagcaggaagtaacgcaccgtttccgggtcgtaatagcccagcacatcacggatggtgaagaagttattgagggattttgacatcttctctttatcaaccatcaccataccggagtgcatccagtaattgacatacgggccgtcgtgggcacaggtggactgcgctatttcgttttcatggtgcgggaacatcaggtcagaaccgccaccgtgaatatcaaaatgtgtgcccagctgtttgctgttcatcgcggaacattcgatatgccagccaggacggcctgcgccccacggggattcccatgacggctcacccggtttggacattttccacagcacgaaatccatcgggttgcgtttcacatccgccacctcgacacgggcaccggcctggagctgctccagatcctgacgtgacagcaggccgtattccgggtcactgctgatatcaaacatcacatccccgttgtccgccacataggcatgaccgcgatcgagcagtaactgcgtgatctcaataatctctttgatgtgatgtgtggcacgcggctctgaatccgggcgcatcaggttcatggcatcgaaatcgcggtgcatctccgccaccatgcgatccaccagctgatcacaggtttcgttattttcattcgcccgtctgataattttgtcgtccacatccgtgatgttgcggatatagtttacatcatacccggcgtgacgcagatagcgcacaatggtgtcaaacgcgacaaatgtccgcccgtgtccgatatgacacaggtcgtaaacagtgataccacacacgtacatcccgattttaccggggttaatgggcttaaattcctctttttgtcttgataaggtgttataaattttcagcataggactattccattaaaagtctgtacgtgttgatggtgacttctgttaattaattgataataaatactttattttttatatctgcctgcggggatcataatctgagacaggtcaggttattgaaacgcgaataccctgcaaatgcaagaaagaccctgtaaaacccggtgattataacaaatactgacgcagattagtgagtatgatataacacaccccggagataaaaacggcagattattgcctttataatataagcagcaggaaattattatggtaacttttcatacaaatcatggtgatatcgtcattaagacgttcgcggacaaagcaccggaaacggtcgcaaacttcctgaaatattgtgaagacggtttctacaataacaccattttccatcgtgttatcaatgatttcatggtccagggcggcggttttgaaccgggcatgaagcagaaaccgactctcggtatgatcaaaaacgaagccaacaacggtctgaaaaacaaccgcggcaccctggcgatggcccgtaccaacgatccgcattccgccactgcacagtttttcatcaacgtggttgacaacgactacctgaacttccgttcagaaacaccaagtggctggggctactgcgtgtttgctgaagtggttgaaggtatggatgttgtggataaaatcaaagcggtcaaaaccggcaacagcggtatgcaccaggatgtgccgcgcgaagatgtgatcatcgaaagcgtgactgtttctgagtaagtatgaccacgcttattattgcagatttgcatttaaatgagcaggagccggcgatcaccgccggctttcttcgtttcctgcgggaacaggctgttcacgcatcacagctctatatcctcggtgatttttttgattactggattggtgatgatgacccgaacccgctgcataaaaccgtggctgatgcactgaaatccctcagtgacagcggcgtgaagatcttctttatctgcggcaaccgtgatttcctgctgggtgagcgctatgcccgtcagtgcggcatgaccctgctgccggatacacaggtgattgaagccgaagggcatcagatcctgatcctgcacggcgataccctctgcacggatgatacggactaccagcattatcgccagcgtgttcacactccgtggatccagcgcctgtttctgtggctgccattgtcgctgcgcctgaaaatcgcgaagaaaatgcgcgcgggcagtcagtctgccaatcagcgcaaaagcgaagcgattatggatgtgaatcagaacgaggtgatgaaggcattccgtcagtaccggacccgctggatgatccacggccacactcaccgtcctgcggtgcatgatgtctccgctgacggcgaaacgcactttcgcggtgtcctcggcgcgtggcactcacagggttctgcctttaaaatcaccccggacagcatttcactgatcttctttccgttctgagccgttatctccccgtatttgtgaaaaatccgtgacgcaaacgttttccttcgtgatttaccgtgatattatgcccgtcttcttaaccggccaacggccggacgtctgtcaattttcgtgacgcgggatgtacaggagcaccgaaaacatgaacgccgcctcttcgcaacaacactcaccggcagccaaagtggctattgttatgggatccaaaagtgactggagcaccatggaacacgccgcagcgatcctcgatatgcttcaggtgccttatcacacagaagtggtttccgcgcaccgcacgccggacaaactgttttcctttgctgaaaccgcaaaacagaacgggtttgatgtgatcattgccggtgccggtggtgccgcgcatctgccggggatgctggcggcgaaaaccctcgttccggtactgggtgtgccggtgcagagtgccgcgctcagcggtgtcgacagtctctattccattgtgcagatgccgaaaggcattccggtcggtacgctggccatcggcaaagccggtgccgccaatgccgccctgctcgccgcacagatcctcgccctgcatgatgaggcgctgcttacccgcctgacagcatggcgtaatgcacagaccgatgatgtcctcagccacccggatccgcgggaggccaactgatgaaaccggtgtgtgttctgggaaacggccagttgggccggatgctgcgccaggccggtgagccgctggggatttcggtttatccggtcgggttagatgccgagccggaagccgtcccttatcagcacagcgtgatcaccgctgaaattgagcagtggccgcagaccgcgctgacacaggtgctggagcagcaccctgcctttatcaaccgcgatatttttccgcgcctggccgaccgcctgccgcaaaaaacgctaatggacgatctgcatctcgccacctcaccgtggcagccgctctcctctccggatgaatggccggacatttttgcccgtctcggggactttatcatcgtcaaacgccgtaccggcggttatgacggacgtggtcagtggcgggtgcgtcccggtgatgaagctgctctgccgccggagatttacggcgaatgtattgccgagaaaggcattctgttttccggtgaagtgtcgctggtcggtgcccgtaaccgcgccggggaatgtgtgttttacccgctgacccgtaaccatcacgaagagggcattctgcgtatgagcgtggccttcccgcagacacaaaacccgcttcagacacaggctgagcagatgctgggggcgatcctcactgagctggattataccggtgtgatggctatggagtgttttgtcacagaggacggcctgctgatcaacgaactggcaccgcgagtgcataacagcggccactggacacaaaacggtgcgtctgtcagccagtttgagctgcatctgcgggcgattctggatctgccgctgccgcagccggttgtcaccgccccggcggtcatggtgaatattatcggcacagaactgaatacacagtggctggcacagccgctggcgcatctgcactggtatgacaaagaagtgcgcccggcgcgtaaggtcggtcacattaacctgactcatcccgatccggcacagcttatcgtggcactcagcgggctggcacaggatttaccgccggaatatcaatcctctgcggactgggcaaaaacaatattaagctggtagtcggcacggtttccggcgacaatagccccattctgatgcccggtgttcagccgggcattttgctttttacgccgtatccggagccgggatgttttcgtcagatcgccgcttaggtcctgtttatcaatggactatactcaccctgctggggctggtttatttcctcaccactgccaccacctttacctcattaggcgtggtcttacccggcatgctcagagagctgaactggagctggacagacgccggtttcggattcaccctgctcgggctgacctgcgggctatccagctttctgccaagtcttctcatccgtaaaaccaatgttcgcctgacgctgctggccgggctgctgctgtttctggccgggttttacagcctgtacaccacacagtcaattcagcgctattttatcggcaccgcctttctcgggattggttttacctttatggctactgttcccggcacttatgtaatttcgcggctgttcagccgtcagtcgctggcgtttggtttttactttactcttggcgggctgggcggtgtggtcgggccgtggatctattttctcgccgcgcatgtgttcggctcctggcggatccactggctgatctccgccctgacgctggccgttgtcactctgatcaccctgctggtgatgcgggaaggccgccgtgagatcactcacgcccgtgccgtgatgtggcagcagaaaaaacagagttcccgtatctaccgcagtcaggcgcgctggagcgcccgtcaggcgctgagaacctggcagttttatgtcatcgccgcctcttataccgcgtttttatggtgcggattcaccgtaaacagctttgccgtgccgcatattatggataaggggttcagtgaaaccgttgccgccacactgctcagtactatggcctttattaacgccttttcccgtctggcgggcggcgctatcggagagtggctggagccgaaaaaactgctgattatcagcctcgccactatcacattcggtgtgctgacactgagtatcgcgaccagctggccgctgctgatcctgtttaccgtactggtggggattggttacggcatgacattcctggcctccagcgtgctgctggcaaactatttcggccgtggtccgtatctggagctgttctctgtggtgaacctgatttccacctttgcctgtctggcaccattctttgccggtgccgtcaaggattacagcggcagctttacccctgcgtttctgctgattgccctgccggtgattgtgattctggcggccacattctttatgcggccaccacaacacaaaccggtcagagcatacacatcgtcgccggactaactctgcaggcggcggtattgctgagaatccccgagcaggcggatccccagcacactgccgcagagtgacagcagaaaaccaccggccagcggcagcccgacccacagcggccactgcggctgccacggaaaatcaaacacgcgggtctgcaacagccacagggctgtctccgctccgagcgccgcgaccactccggccatcgcgcccagcaaggcaaactcactccacagcgtgcgccgcaacaggcgtttaccggccccgagcgtgcggtataccaccagctcggtccggcgctggttcatccccacctggatctgtgccagtaataacagcacgccgcaaatcagcaccagtaccaccatcgcttccagcgcacggctgacctgcgcgagaatggtctggatctgtttcagcatcgagccggtatcaaaaatactgatggacggatacttgcggttcatctgggtgattaacccgtcattaccgtcatagtgaaagctggtcagccacatggcgctctggttttccagcgaggcgtgattaaagatgaagaagaaattaggccgcatactttcccagtccacctgccgcacactgctgacagtcacggtaaacggccgggtatcaccggtaaaggtcagggtatccccgactttcagcccgagttctttgaccacttccatctcaatggagacttccccgggtttcggcggccaggtgccgtccaccagttcattgagcggcggcagcgattccagccaggtgaggctcagttcgcggcggaccgtgttgttgcccggatcacgcgcatccgcccatgccagcgcagtttcgccgttaatgccggacagccgcgccagcaccaccgggtaatattccgacggtgtcacgttgtgtgacgccagcaactgattgaccggcgttatttgttcttccgtcatattcacgagaaaatagttcggcgtgtccggcggcagttgctgctgccagcgcccgatcagatcaccgcggatcatcaccagcaatcccagcagcataaaggagagcgcgaacgccccggtctgtaccagtgtctggccgggctggtgcagcagacggcggacagccaggcgcagactcagcgcacggaacgggatttttgccagcagccataatccgccgtaaccggccaccgccagcagtgcggcgatcaataccaccccggccagcaccgcccagagcagaaacgaggcattggtcagcaccgccagcccgcctgccacaatcagcaccgccagcggcagataccagcgcagcggccagaccggcgccaccacatcatcacgcagtacgcgggtcggttgtgtcagcatcagctggcggtaaggccgtgcgcccaccagcaacgtgatggcaagcagtgtcagcagtgcccatgcccacggccataatcccggatccggcagcgccttcggcagcagcggtgccagcaggctcatcaggattgcatcaaaaatcagtcccagcagagatccggcaaccattgctgccgccatcagcaccgcccactggccgaccacccagtaacgcagctcgcgccgcccggctccgagtgttttcagtacggcaatcagggtgtgacggctgcggcagtaatgcgacatagcaaccgccactgcggcgatcgccagcaacaatgtcagcagcgcagagagcaccaggaactgctgagcgcgatcgatcgacttcgccagcgccccgccttcctgtttcagggtgacccagcgctggtcaatccgcagcgcatcttcatactgctgtttaaacaccgccaccgcatccggcgcaccggcaaacatatcgcggtaggtcaggcggctgcccggctgtacggcaccggtggcttccacatcctgtaaattgatcagtacacggggcgccatctgaaacgggttaaaaccgctgtccggctcctgaataagaaaaccggcgattttcagatcggtatcccccacttccagcatctgtcccggttttaccgagagcagctctgccagacgcggcgcgatcaaaatctctccccgggccggtttcaggccgggcgggtcggtttccagctcgccgtacagcggataagcgtcatccgccgctttgacatacaccagttgcggcacatcattggcaaataccatggtgttgaaactcatctgctgactgagcgccaggccgctttcctgtgcctttttcagccaggtttcatccgccggatacgagccgcgcagtaccagatcaccggccagatagtcacggctctgatagttcacactttgattaatacgatcaccggcacgtcccagtgccagcacacaggccaccgccagggtcagtgacagccagaccaccagcagagacggcgtacgccactcccgccagaaccagcgccagatcatgccagttcctccagcttaccgtccgacagtttcagccgccgctgacagcgggcagcgagggtcagatcatgcgtgaccagaatcagggtggtgccgtagtcgcgattgagcgaaaacagcaaatcggcaattttgtcgccggtgcggcggtcgaggttgccggtcggctcatcggcaaacagaattttcggccgggtcgagaatgcacgggcgatggccacgcgctgttgttccccgccggaaagctgggcaggcatatgtttcaggcgtttttccagccctagctggatcagcagctgctctgcattctcccggctgacggattcggactcaccgcgcagcagcgcaggcagctggacattctccagggcattaagggtcgggatcagcataaaggactgaaacacaaaaccgacatcccgcgcccgcagttttgcccgcgcttcctcatccagctgcggcagtgactgcccgagcagtttcacctcaccggaggtcgcgtcatccagaccggcgataatgccgagcagggttgattttccggatccggattcccccaccagcgcgattgtttcttcaggctcgacaaccaacccggcaccctgcaatatagtgatctcattttcaccctgaccgacgcgcttaataagatgatcaatttcaagaataggctccgctgccatctctgtttcctttttctgctgctgttcagcgggaatttgtatgccgccggaacattactgatactgggggacagcctgagtgccggttaccgccttccggccggagaggcgtgggcggcacagctgggacaacgctggcaacaggccggtaacggtatcacactgataaacggcagtatcagcggaaatacggcggctcagggacttgcccgtctgcccgcactgctggagcagcaccggccgcaatgggtactgattgaactgggtgccaacgacggcctgcgcggtctgccgctgacacaaacccgcactgaccttcaggctgcgattgatgcagtgaaggccgccggggcgaaaccgctgctgatgcagatccgcattccgccgaattacggcaaacgctataccgagcggttctcggcgctctatccggcgctggcacaggaaaatgccgttccgctgatcccgttttatatggaagcggtcgtcaccaatccgcagtggattcaggatgacggcatacacccgaacgcggcagcacagccttatgtgactgactggatggataaaacactgctgccttacttacagtaacgggtgtcagactatcctaaatgatttatccataatttataagcagttaagcaggtaaagaaatgcaaaaagcagttttgatcaccggcagctccagcggtatcgggctatgcgcggctaaaacactgaaacagcggggctaccgtgtgctggccgcctgccgcaaaccggcagatctggctgaaatggcgcgcctcgggtttgagccggtggagctggatctggactgcccgcagagtgttgcccgtgccgcagagcaggtgctggcactgacagataaccgcctgtacggcctgttcaataatgccggttttggtctgtacggcccgctggacaccgtcagccgtgaagatctggaaaaacagttttccgccaatctgttcggcacacaccagttgaccaccctgctgctgcccgctatgaaacaggccggtgaaggccggatcatccagaccagctcggtaatggggctgatttccacgcccgggcgcggtgcctatgccgccagcaaatacgcgctggaagcctggtctgatgccctgcggatggaactgtccggcagcgggatccgcgtcagcctgattgaaccggggccgatcactacccgctttaccgaaaatgtcacacaaacgatgcaggataaaccggtaaaaaatccgggaattgccagcctgtttaccggtaaaccggaggatgtggtgaaaaaagtcatccacgccctggagcacccgcacccgaaaatacgctatcctgttacgggtcttaccgtaatagtgatgtggctcagacgcctgctgccgctgtggctgatggataaaatactgaacaaaaaatccgccgccgcttgaaatgccgcgctgcgcccagatgttaatagaaagtccgccaatttattaagagaatgaatatgttatcaaacgcacatatcacagacgttaacgaaaccaatttacgccaggttattgaatcttcaatgcaggtgccggtggtctttttcttccattccgcacagtccccgcagtgtcaggaactgggcgccattctggaaaaagtggcggctgactatgccgggatgatgatcctcgccagagtgaactgcgataccgagcagatgatcgcctcacagttcggcctgcgtgcggtgccgaccacctatctgttccatcaggggcagccggtcgacggttttgaggggccacagaatgaagagactgtccgtaatttcctggccaaattcctgccgtccgaatctgaaatcaaaaccggtcaggccattgaactgattgaagccggcgattttcaggctgctctgccgctgctgcgtgaagcacaccaggctgagagtaataacagcgaaatcaccctgctgctggcacagacactgatggaagtgaagctgtcagaagaagctgaaaaagtattgaagtccgtcccgattcaggatcaggatacgcgctatcatggtctcttatctcaaattgagttacaaaagcaggccgcagacaccccggaaatccaggaactgcaaaatacctttgcggcggatccggagaatgcagagctcgcggtacagctggcactgaaactgcatgaagtgcaccgcaatgatgaagcactggccctgttattcagcttcctgaagaaggatctggcggctgcggaaggtcaggtgcgcaaaaccatgatggatattatggcggcaatgggaaccgcagacagtactgccgcatcttatcgacgtaagctatactcgttactgtactaattaattgccttactgaattatttaacccactcattactgataaggattttggctcatggatttgttctcactgggttttgtcccgattattattctcatcgccgtcattattgtggcaaccggtgttaaaactgtaccgcagggctttcagtggactgttgagcgttttggccgctatacccggacactgcaaccgggtctgcatattattgtgccgtttattgaccgtgtcggccgtaaaatcaatatgatggaacaggttctcgatattccgtcacaggaagttatctcccgcgataacgccaacgtcaccatcgatgccgtctgcttcattcaggtggtggatccggtgcgtgccgcgtatgaggtcagcaacctggatctggctatcatcaacctgaccatgaccaacatccgtaccgtgctgggttcgatggagctggatgaaattttatcccagcgtgactccatcaactcccgcctgctgcacattgtggatgaggctaccaacccgtgggggattaaaatcacccgtatcgaaatccgcgacgtgcgtccgccgaaagaactgatctccgcgatgaacgcgcagatgaaagcggaacgtaccaaacgtgcggacattcttgaagcggaaggtatacgtcaggccgccattctgaaagcagaaggtgaaaaacagtctcagatcctgaaagcagaaggtctgcgtcagtccgccttcctggaagcggaagcccgtgaacgtgcggcagaggcggaagcccgcgccacacagatggtatctgatgctatcgctgacggtaatatgcaggctattaactacttcgtggcacagaaatataccgatgcactgaccaaaatcggtgcggcggaaaacagcaaagtcattatgatgccgctggaagcaagcaacctgatgggcgctatcggcggtgtggctgaaatgttcaatgtgtcaaaagacactaaaggtcagggtaaatccgcatgattgagatgatcgcatcacaggcggtctggttctggctctgtttcggcggcatcctgctgattctggagatgctcggtaccggcggttatctgctctggagtggcgtggcggcactggttgtcgcgcttctggtgtggattatgccggggctcagtctcgagtggcagggtattatcttcgcggtgatgacggtgatctgtgcggtgttgtggcgtaattttcagcgccgccgccagcgtaatgacagcagttcgccgaatcaggtcaatcataagctgatcggcctgcgtgccgcactgctggcagagacggaagacggttacagccgcatccgtctggcagacggcagctggcgtgtctacagccagtcggcactgcctgccggtacggaagtggaagtgattgccgttgacggcattacactgacggtccgggctgtcagccggtaactgaccggaaagaccatctcaaaacggcctctggtaacagaggccgttttttatgtactcccgcatcacgcgcctttaaagcggtagcgttcgttcacggaattggtcaaatcctgcataataatattggtcagtttatccgtggtatttaatgcatcctgcatgactttattctggaagtcctgtaacagctgtttggctttcgccgggtctgttttataaatactcagatactctttttccattgcctgttgttctttggcaaactcagcttcctgtttgctgtattccgcctgcacaattttcgaatatttattaaagtcgatcatcgccagtgtctgtaatttacggaatttccagtgtgcggaggcgttatccgcctgcggtgaaccgatggtataagcttccacgtagctgtccgggccgtaatataccgggacataaacggataatgtcggcataccgaaggcaatataacggacattcccgatttctttcggtaaatctttgcgtacctgtaaaatatgggagtgctgggttctgaataccgagattggtcgtttagtggtatccggataggtggttgcatacggagatgtaccgacattttcataatggttgcgcagtccggctttaatatcttccagccccagttttttcgccggttttaagaagacagggaaatcattggatttcacatctttaaagtcagttttaatttccgggttatacattttctgcagcactaacactcgcggatagttgtaataaccgtcactttttgcgtcatctttggtataggcttttttgaaattaaactcaccgtcttttttcggatcatataagccatttttctcggcaaaggaaatcagtgtcggggatgacaggtaattttctttgtcattcatatcaaatttttccaggcggccctggtttgcggtgacgtaataggtattggccggaattttcgctgccatccactggtggccgctgccggtttccagataccagatcccgtctttatcaataaaggccacgccgaaaccttcaccggcccctttttcctcaatgattttccctaaccgcatcaccccttcttttgcggaagagacatacggtaataccacatccggaatcgcatcttcaataatcccggtatcttcaacatacgggtcaatttttaatgaagcttcattggcgaaaatcgtttctgtggcactgatcccgacaccggcgtcattaaagccgttggaactgaaacggaactgacctttatcattccattccgggatagtggtataacgcattgccttttccggcagggtataggtgaatttatttaagttggttttaaactcagtgtctttatttactttttcctgattcacctgcaaaactttcgggtttgccggattcatatcttcattgcgggcaatatattgcgcaccatctgaagacgcattttcaccgacaaaaatagtggtacacgccgttgcatcagaaatcaccagtgcagcacccacagcaagagataaaacactacgtttcatagagaacaccttccattgagttataaattgcgcttacgctatccattaccaactgaattttcttttacgcagatcgcataatgcaaagtcaatcactgaattattcgcaaaatatggtgcatttcactaatttgcgatttaatcacggataagtgttttggttaaaattacggattattttttcagcggggaattgatcggaaacaaaaaagagaaacagaggtaatctattttgcctgaggtaaaaattaaaaaattttactgtgagatccgaggcgagccaatttcagacagcgatcaccttattttttataaatcaaaatcaaatcaggatagaggtggcaatcacgaaatgtacgccaatttcctttaagcggatgatcagcgtatttttcaggtatagggagatcatttaccaatatattcaggatgttctgtagactgtcatttaacatcatacggtaaatacccttaacttcccgtttataatcttttttaaactgagatgaacgttcaatcgtccttgccatcctgcagatccgccattaaatctgaaatactgtcaaattttttgcctttcccgcactccaactcttctattgcggcccgggtacgtgcagcatgacgatattgtgtacttttcacacaaaatggcatcgctttctgttcaacaatctgaatcatcaacattcttatcgcgtcactcactgttaagcccatcgattcaagcgtttcaatcgcttctgctttcagcttcggatcaatttttgctctgacatattccactttagagataaccagccctcaaagcaggtgaataaacagacgatagtgtagtcataccgtagtcgttccacaatcagattaagtacagccgaactgataaccctgatcataaccacagttatataaacaatttttaaaccacgccggattgtcatattaaaaaacggctccgcagggagccgttttatcttactgaataaactaataattacttcactttactgttcacactgctgtgatcattagtgacagaaataccgaccggggattttccgtttacaattccgtccttaaccgcgctgacagcctgtccggcattgagcgggagttcgccgtgaatgcgggtgccggtctctttgaccgccacagagcgcatttcggtgttcccgccatccggcagaccgtccagcaccgcgccggtcaggatagtgctgccgccggtacgcagtttgccctgttcacgggcggtcagaccggattgctgtcccacctgttctgcggaacgggtttcgaaggacgctttaacattgccgttcatcccggacggggatgtcaggccggatttcaccttgtccgccaccgtaccagcaccggctccggcattttcccgtacagaatctgccgctttatccagtccgttttccagacccgctttgatgtcatctgcaaacttcggtgtaccggcattggccagttttgaggtggtactgctgccctcatcattggtatgtgccgccgacagatccgcgtcaactttcagaacagattcggtgttagtccggctttccacgatcaaatcaccgccgacacgcccgctgatggtatccgccgtcagttttccgccccggatctgcgtatcattgcggctgttcagcgtgagatttccgctgtcagcaagggcatttttctgcgttaccgtctgctgattatcgatcccgcccttcagaccggcactgatattatgccgcgaaccggtttccggattttctgtactgcgcgaggtgccgatattcaggtttccgcccgcattccagttggctttgtccgtggttttctgtgccgattcaatcacaataccgccgtcacgggcggtcagcgcggtattttgtgcatcaatctgcgtacctttcagatgcagcgcatcatcccgcataccgtccgcagaaacagaaacagtaccgccgctgcgcaggctgccgccgcgctggtcagtcacgttttcagactgtttgctgatactgaaatccgcaccgccgccgggtttgctgccgatctctgttttaccgccattagcctgaacaccaccgtgccactgatggccggagatggtattcgtgctctccgcgctgtcaagcagggtgttgtgtccgcctttcaccgtcacatccccgccactgctgacattagtaccgttagcggtcaggtcgtttccggcctgtaataccacgccggttttgccctcaatcacgccggttttcgccgttgtgccgctttcgttgtacacctcacgtccgccgctgagaccgccaccggcatttttcaggttgagcgattccacatttaccttcgccccggcatcatagccgctgacggttttgctgtgggtatcacccgcctgatccagcgtcagattatcaccggcacggacagaaacgagcccttcctcactgcgcagtgtatcgccctgcaatgccgcatcacgccccgcctgcacagagatatcccctttcgctgacagcgaaccggtcaccgctttactgctgctctcagttgccagacgatgaccgccgctgccttccgcgctgatcgcaacatcctgtccggtggatgttgccacacgcagacttcctttgccctcagtcacagattccgactgatgatgtgtatccgctgccgccgcagactgataatcgccggtgctgatcgcaataccgccgttatccgcccggtactgtgttccttcatcaagaacacgatccgtggtgttcacggcaaccgatcctgcattaacagaggtggtttttgcctgtgtgttttcactgatggtctgccggttttcccctttaccgctcaggtcaacgccgatatccggcagtccggtggcagcggtgctgtccgccaccccggcaatattgccttccgcaatattttcaccggctttggccagcggacgggagactttgctgtaatccagcgaaacaccaaggctgccttcgccgcctttacgggtttccgtggtgcgatcactgttgtgagccgcccggtgcgccgagttttgcgcagtttccgtataagcgccgcccaccgtgtgtgatgcgccttcctgcgagagcgttttaccggcggtcagggtgaggttaccctgtacctgtgtgccggaggtgaccgcctgatgctgctcctgtgtcttaccggtttcagtatgaccgccgctcagaccgccgccgagtttatccatgccgccggtcagataaataccgccgtgtgattcccctttctgctgtgtccgggtttcacggttatccgctgcgttcagggtgatattttcagcggaaagcgccgcatccccctgcgtggtggtcagagaagagccggtaagggtgagatcatttccggcggtgacagagacactgccgcctttgagttcactgccctgctgcgtgacagaatcctgcttttgcgtgtcgcgggtatggttgatatccagaccggcgcggtactgtttgtcctcatcctctttggcatagccgctgattttgagtgtggtttctgttttgtcagactgtttttgtgcctgtgccgcacggacattgatatcaccaagggtatcaattttcagtgtgcccgcactttcaatcaggcttccggcgatggtgatatcatttttcccggccagccgcaggtcagcttctgatttcagctcgctgcgctcaacgcgggtatcttcactgttttcacggagggtactgcgggtgatgttaaacgcgccgccatcacggttatcaatgtgtttcgccgtccggctgatgccgttttcaatcaccagcgcgccctgtccggtctgcaccagactgtcctgtgtgccttttaccttgctgccggtaacagtgacgccgttaccgccggaaagccagagcttaccgcctgcggtaatgtcagagccgtgcgccgtctcttccgtggtggcccggttttcacgggagccgccgccgataccgccccaggaggtgatattctccgtatgcccctgatgctgtgtcgtcgtttgcgtaccgatggtgagattattaccggtgttgatgatcagatcctgtccggcgtgtacctgtaccgcctgagcccggatgtcatgaccggcattcagtcccagattgccgcctgcggtcagttccgttttcaccagttgctcttttgacgtgacatcgccgtgtgtgccgctgagcagttttgccgtctcattgcgtttattgccggacaccgtctgagtgcgggagtcagtcatgctctccagccggatatcccctttggcatccgcactgagatgcgatccggccgccagtgttgcccctttcagggtaatatcaccggttttggctgccagacggatatcaccgtcagcacggaggttgctggtttcctgccggatgctttcatctttgcgggtttcattattttcccacgacatcttccactgatttgtggtacgggtgtctgactgtgcaacctggtcgctgtcgagcgtgatggagccggcatgaacggcgatctccagcccgtgcagatcagtgccggtcagccgggcttcctgctgcgccaccagtgtgatgtttttgccgtccagtgaggtgcggctgtagcgctcctgcctggtttcgccggtgacggattgcccgctgcgtttgtcttctgtccgctgatgttcgttgcgcagctgtccttcggtacgcagcgtatcaccgctcaggcggatatccccgccggtgacctgtgcgccggtgagtgtcagagcgccctgagactgagcatcgaaaccattcacagcatcaatattaccggccagtttcacaccgctgccctgtgcggtattcaccagacggattttaccggcacgcatgccgcccagataatagctgtccagcggaaccgcatttttcccggcggaaatagtctgcatatcagcggaaacggtattgttcccggtgatcacattcagtgccgccgcgcggatctccccgtcggcattaatcgcaggcgcaaccagatccagcactttaccggtcgtgatcccgttatttccgatcgtcagtgaactggtgttatccagcgtactgtatgcactgatcattccgttctcaatcagcggattacccacgatcagcccggcattattggtgttgataaaaccacagccctgacagctgatcccgttcgggttggcgagaatcagatccgccgccatgccgaacacttcctgctgacccagcagcagagaggggttacggctgaccacttcattgaggatcaccccggcggcctgcccgttcaggtttttgttggcctccagcatacccgccagctgcgactgaccggaggtcatgctgttattaaagaccgcgccccggttatccacattaaaatcaagatactggttatgagacaacccgttactgttcggtgctgtaatattgacaatatccgttccgtttacctgagaaactccggggccgtccgggccgccgtccgccacaatccctgcggcggcgctgttcagcgtgacgaaggccagcgccatccacgcggccaccttacctgacgaagatagtttaaagcgttcttttttcattgtatttccttaccatccaacgactgacggagcagatcagaactgatatcccaggcgcagggaaaacagggtgtcctgtgcgggcagtgccgccacagaggtccgggcgcggctgatttgcgcatccagctgtgcgccgccgtaactgacattaacccctgcggcgatacccgcggcagactgccatcccgcctgcccggtctgagccataacccgtccgtagtccgcaccggcacggggtgttaccgtgatcccctgccggacaaaacggcgggaaagggtgttttgccagtaccatcccttatccgccgataacgagccgtcgtgaaaccctctgatcgcactgttatccgacagtgtcagccactcccccccggggaggtgatcctgtgtgtactgaccggccagatgactgctgaacagatacgcgtcttccgacagcgaaaactgctgaatataactgagtgagaatttgcctttggtgtattgcggatccgagcccggcatggtgttccgggtagctgccccgaacagtgtggtgcccttctccgctgataaagaggtgctgataacaccgcccggtaccagaatcagcccggtgtaaccggcttcggcgatactcagggacgggctgctgacgccaatcagtgtgtcattgaggtagttgcggctgcgtttgtaagtcatctgcgccatcagggaatcaatccgtgagcggttacggaagatgacataatccgcccgcagtgcggcctgagcgctgtccccgctaagaatgacgtggttatagcgcagcgcctgagtgatgcggtaacgggaaagactgccgtaagtgctgatcgtcagtgcgccgtaaggtacggagtaaaacagcatgccagagcggctgtaacgcgccgccggattatcggttgtggcagagccgctcaggctgacaaaatcagataatcctgccgggctgtctgcggtgactgcggcgcggataacattgcgtccggtacttttctgcccgtaattatctgcactgatagaaaacccggccggagtgccgcgctgattaaccagccggatcaccgatcctcccggtgcgctgccgggtagaatatccatagtgacatggttggatttcaggcggtttgcctgatccagcccctgctccagttcggtgattttcagcggtttgccggtcagagcgggaaacagcagagcggtattaacaccgcgatccgtgctgtcgatccgctccacggttccttccgtcacgccgatccccagctcgtgataatcgttgaccggcagaaagcggatccgggcggtgatatagcctttatccagataccgctccatcagttctgccaccagcacattaatgtcacggctgcggatacagtctgcgggcaatggcgaaagtgagcgtaggtcgtcctgagataacagtgtgataccggagagatacacgccgctgaccggcagacagtgttcattctctgccgcacgcagtaacggctctgtgggggtgatcgttgtctgcggcttgctcagttgccggtaagtctgctgttccagcagatcactgacctgctgtccggcatcctgcatcgcccggcgcgaggcatcagcgcccggattttccgcagcagcagggaaaggtgcggcatataatgtcgggcaaaaaaacagccctgataataatatgcggcgtaataatgtcagcagtttggtcaattcgtcttacttatcctttacgccggttaccgccgcagcggacagaaatgccggttttctccggtataacgccggatgaaaaagagccgtgcttttatctgttatcggcagaaataagaaaaacttaactgacaggatgtaagacggcgtctgcccggcgggcagacgcacaaaacagacggattatttatggcaggcaggtttgctgtggcggcatccggagagatgatcgatgatcggacactctgcgctgtcatccccgggacaggaatcagccagtgccagcaggcggtcacggatagccgtgagctccgtaatggttttctcaatctgcttcactttgcccagtgtcgccgatttcacatccgccgcgtggcggttcggattacggaacagcgataacagctcgcggcactcatccagcgtgaacccgacctcttttgcctggcgcagcagagtcagttcatccacatgccgttcactgaaataccggtatccgttctcaccccgttccggtggcgtgatcaaagatttatcttcgtaaaaacggattgcttttggtgttaaacccgttttttgtgcaatatcgctgatattcataacttctccttgaccttacccttgagggaaggtttaccatcatcgtaaatcaaaattcccgttcccccgaacagaattttttctcttgcgccgtgtgctgatatgcggcgtgatgatgcgaaacatgtaaggaaaaaaagtatggctaataccactattctcgcgttacaggggctgtcctgcggacattgcaccggcagtgtgaaaaaagctctcgacgcccgcccggatgttgaatctgcggtggtcacccttgatttcgccaaagtgaccggcgatgcggatgcgcaatccctcatcaaaactatcgaagaagcaggttatgaagctcagattgcagacaaacccggtacaattttacagctttccgggctgaattgtatgaaatgtgcagcgaaaacgcaaagtgcattagaagcggttgacggtgttgcggccgcggtcgttgataccaaagaggcaaaagtatacggcagcgctgatgcgcagaccttaatcagcgcggtggaagccgccggttttcaggcagcagtggcgggagaaaacgcctccccaaaatctgaaccgctgacgccgtctcagactgaggcggcggcagcggagcactgcgacattccggccactccggacaatatccctgccatgccggtgattgaggaggatgacgacagtctctccttcctgctcgacggcatgacctgtgcaagctgtgtcagcaaagtacacaaagcgctgctcagtgtggacggtgtggaaaatgcccgcgttaacctcgcggagcgcagtgcactggtcaccggccacgcctctgcagaggcgctgatcgccgcggtggagaaagccggttacggcgcggaactgattcaggatgatgccaaacgccgtgagcgccagcaggaagtcgcggttgccaatatgaagcggttccgctggcagtctgctctggcactggcggtcggtatcccggtgatgatctggggaatgatcggcgacaatatgatgctgaccccggcgaacaacgggatctggctgaccatcgggatcgtcaccctggcggtgatgattctggcgggcgggcatttctaccgcagcgcctggcaatccctgaaaaacggcagtgcaacgatggataccctggtggctctcggcaccggtgccgcgtggctctattccatcacggtaaacctctggccggacgtgttcccgccgcaggcgcgtcacctctattacgaggccagcgccatgattatcggtctgataaacctgggtcatatgctggagcagcgtgcccgccagcgttcgtcaaaagcactggagcgcctgctggatctgactccgccgaccgcccgtgtggtaacaccggaaggtgagaaagatgtaccgctggcagatgtgcagccggggatgatcctgcgtctgaccaccggtgaccgcgtaccggtcgatggtgagatcaccgaaggcgaagtgtggatggatgaggcgatgctgaccggggagccaatcccgcagcagaaaaccaccggtgataccgtttctgccggaaccaccgtgcaggatggcaccgtgctgttccgtgccgccgctgtcggcagcaaaaccacgctggcacgcatcattaaactggtgcgtcaggctcagagcagtaaaccggaaatcggtcagctggcagataaaatctcagccgtctttgtgccggttgtggtggttatcgccctgatcgccggtgctgtctggtacttcttcggccctgcgccgcagataacctatgcactggtgattattaccacggtactgattatcgcctgtccgtgtgcactgggactggcaacgccgatgtcgattatttccggggtcggacgcgccgctgagtttggtgtgctggtacgggatgcggatgctttacagcaggcaagcactctcgacaccattgttttcgacaaaaccgggaccctgacagaaggcatgccgcaggtaacggaaatccatacctttaatggtttcagtgacgatgatgtcctgcgtctcgcggcggcgctggaaagcggttctaatcatccgctggcccgcgctatcactgaacgtgcgaaagcgctgacactgccgtctgttactcagttccgtaccctggcggggatggggatcagcggggagtctgaaggccggacactcctgctgggtaaccatgcgctgatgcaggcacagaatatcagcactgccggggaagcggatgcgctggtacaatcccaggccggtaaaggtgtgactccggtgatgctggcagttgacggcaacatcgcggcgattctttctgtccgtgatccgctgcgtgaggacagtgtcagtgcgctggcgcgtctgcacaaacagggttaccgtctggtgatgctgaccggggacaacgaagtaaccgcccgggctatcgccaaagaagccgggattgatgaagtaatcgccggtgtactgccggacggcaaagccgctgccattgaaaaattacagcaggccggacgccgtgtcgccatggtcggtgacggtatcaatgacgcacctgcgctggcacgggcagatgtggggatcgcgatgggcggcggcagtgatattgccatcgaaacggcagcaatcactctgatgcgccacagcctgcacggcgtggccgatgcggtggctatctcgaaagggacactgcgtaatatgaaacagaacctgctgggtgcctttatttataacaccctcgggatcccgatcgccgccggggtgctgttcccgttcaccggcactctgctgaatccggtagtggcaggggcagccatggcgctgtcatccattaccgtggtcagtaacgccaaccggttgttacgttttaaaccgaaagattaatctctgacctgataagggagcgaataattcgctcccttatttttttcctgttaattaaccggatattacttatcagggttgaaaaaagcccgcgcttgcagtcaactaaggtatcgtttcacgacaggagtcgtcatgaaaacactgttccgccggctgaaagattaccttatcccgcctgatccgcagggtggctgcacctggccttcggttgaactcacattgcccggggatatctcactgcatctggtaggcagtattcatatgggatcggaagccatgtacccgctgcccggcccgctgctggaaagaatcaatcgtgctgatggcctgattgtggaagcggatatcacccgtccggcaccgccgttcccgggacaggaccctgaattcccccgtctgccggtaagtgagcgcttaccggagcacctgagagatgactaccgccgctattgtgaggaacagcgtcagccggtacagacgctggataccctgcccgcctggcaggtggcgctgatcctgcagtccgcccaggcacaaagcctggggctgcgtccgcattacggcattgattatcagatgctcaatgccgctcacggacagaatatccccgtttttgagctggaaggcacacaggcacagttacagatgctgctggatttcccggacgaagggctgagcctgctggaagataccctggcctactggcatgacaatgcccgcgcacttcagattatgctcggctggtggctggattaccggccggaaaaactcgcgcagccgctgcccgccaccttcagcgagcagacgtatcagcatctgatgataagccgcaacgacgcctggaaaaccaggctgatacagctgccgcccggcaattatgtggtagcggtcggcgcactgcatctttacggcgaccataatctgccgtccattttgtgttaaactggcaggccttgtgacactgccgtctgaattatctgcaaggaaagacctatgacaccggctgtaaaacttctggaaaaaaaccggatttcattcaccctccatccgtatgaacatgatccgaatgatcataatttcggtgatgaagcggtccgcaaactcaatctcgatgcccgtcaggtatacaaaaccctgctggtggcgcttaacggtgataataaacatctcgccgtggcagtcaccccggtatcagaacagcttgatttaaaagcggtagccaaagcccttggtgtgaagaaagcggaaatggctgacccggtgaatgcacagaaagtcaccggctatctggtgggcgggatcagcccgctgggacagaaaaaacgtctgccgaccctgattgatgagggcgcacaggaatttgccactatttttgtttccggcggcaaacgcggcctggatatcgaactggcaccgcaggatctggcaaaagtgctggacgggaaatttgccccggtggcgaaacgggactgatacacagaaaaaagcacttcccgggggaagtgctttttagcttattattacaacaatctttcatcaatgcattaaaggaacagaaccagtaccaacaacactgcgttccctgctatggcggatttcgagcttaagcccctgttgttttcttactattccggatgttttttcacccatagaaacaatacccggtgcatttttcaggcgctggtatttaatttgccatgagtctccttcatatttcataaatgctgatccctggatattttccagaactgctccgctgtagttttcatgatatccgtagtcgcgatattccattgctccaatcattccatgcccatgctcagacgcatgtaatctgttatactcggcatcttctttacctccctgaacatgtcgtaccctgatagtcgtatcatccagtttatcagcaacaaacgagcacccgctgaaccccggcgtgaataccaactgaggctgaccattttcaggatgggcaggaatatccgcatatcctccttgcggaacccaatatgctaatgttgttcctttccctctctggaaagccgatgtttcggtatcaataatccgtaatgcattgataccgttatttccggccggtatatgaacagcattaaattccattattccgcctttaacggcagaaagagaacttcgcgtcgaactgtccatttttaccttcgccgggttaatcaggtcagtaagcagaggtgtttgctgtaatgtactgtcagctaatacatcatccagcctgacgggttctcctttaaataattcagtaaccgtgttcgctgccggaggtatcaacttagcgccccgaatttccctgtcactgcctgtactgatgcccggttgataaagagatgttccgggaatttgtgtgcgcggataagcaacaagcccctgttcatcagaaaatgacaccggattattcctcaccattgaatacagattcagtccgtcaacagttcccgcaggatctgaactcagccagcgccctgcccacggctgataatagcggtagccgtagtaatacagcccggtcgcatcccgctctttaccggaataacgatgggttttgtagtcaatgccactgtccgtaccggccaccagcacagctgtgccgccgaacggataatattcctcctgactcagcaggttaccgtcgccgtccgtttccaggccgctgctgccgatcagattgtcataactgaaccgctggtgatcttttttgccgtccagccaggccgaacctgtgcccgcccggcgacaccggcgcagatcacctgatagttttcttttccgcggtacagctccagccccggcagatagatgacctgctgtgtctgtgttctgctaccggtttcctgcacggtggttttcaggatacgctggctgcccgcatcataacggtagctttcgcggtcaccggcggcaccgttacgcaccaccggcgtaacctgttgcagctcgccgcgcgcagtccatgacagggtttgtcccggctgtaactgtgtctgctgtccgcccggggtgaacagggcctccgctttctccggcgtgtccgccagggttttcagtaccgcgcggttgctgcgctgactgaccgtgatatccgtggtgtggttattgccggtcttcggtgctgaatgacggatttgtgtcatattcccggcacgatcatagatatagttgcgggtgtaattggcgtaactggctttatcaaacggggaaatatccggcagggaactgcgttgctgtccggcactggccatctcgcgcccggtggcgctgaccagctgatacagggtgtcgtaagtgtatcggttttccggcaccacttttctgattatgccagaatcgcgtctcctcggcgctattggtcacacacagcacattgccgaccggatcgtattcataacgcagatcctgaaatatttttttccgtgccggatgttcggttttgacagcaatcaggcgctgggtttgcggttcataagtgtaagtggtcactacaccgttaccgtgctcttcacacagcttctgcccggcagcggaaatacgtcacagatttgatattgattttttccgttcccgctttcaccgtccccggctgttgctcagcatcccggcgattatcataatttgactttctgctggtgacccctccgcatcgttggtgtcaacaccactctgttcgcatctgtcgtggttctgtgttgtgtatttttccacaatatataattgttttcggatttgctttctcgtcacggttgctcagtaccgtcaccgacggtgtttttttatgtaacgtgttttctgttttgctcattaatagtgtccttattaagggaatagatatccgcacaaatctgatatttatccaagcggatacctgtttattttaggaaaaataatcaaaacagacagagtgaatcgtgggaaatgctgataaccatacggattaataaaaatatttatataaaacaattaattaaattatacaaaaaacattaatgcccagtgaaattaataagccttgtgaatgaaaataatattcagtctgaaaagagacaatcagctatatcaactgagtttcaatggttttccggcagaaattatgcgtctgtgaatcgggctgccatggtcatcgcaggatctggcgaaagtgcgggaaggtgttgcttccccgtactgaaaccacgcactgatgtacaccaaaaaaaagcacttcccgggggaagtgcttttaccgctgataaaaattaatttctcctgaaagtacgactgaatgatgcacgtaaacggcccataaatccggtatgccgccggactaattgtccgcctgataccgataataatttaggtttatacgtgttccactgttcagggtttgatacccacggagcgtcaacctcattatcatccttgtaaaaatgtatatttccgccaagccgttctctgtttctgtaagcatagcgcaattcgctggcagtgatagactgtccgcccattcctgacttactgataatttcctttatatttaaattatcaagagcaaagtggattttattaccgccaccggatgccgcaatttctatccccagcttactacctcttttccagagaagtttcggtacagattgtgccccggacatatgccattcatgatattctcttttccagagaagtttcggtacagattgtgccccggacatatgccattcatgatattgcgtacttccgggattttttctgacctctttataaacagagtgtatattaaatttctcatttttttcaccagcagaaaaataactgtcccacaaaggatatgctctgcttttctgtacacggtcctttatatcagccggtggcgataactttttctcatatttatccggtgatttcatgaaattctgtaatattttcatatcaacgctcatcaatacctgaccggataccgtattattatataaatcaattatcgatgcaggtgcgtctttgctgtcaggtaaaaacggacgtcccagtgcagaagaaatatattttcctctgaaaccggcaaggccataaaccatatcacctttttcttcactgaagttttcactgatgggtttccgcccgtcatcatctcttaacgtcaccggattattcctcaccatccggaacagattcagcccgtcaacggttcccgcaggatctgaactcagccagcgccctgcccacggctgataatagcggtagccgtagtaatacagcccggtcgcatcccgctctttgccggaatatttgcatcccgctctttgccggaataacggtgggttttgtagtcaatgccgctgtccgcaccggccaccagcacggacgtgccgccgaacggataatattcttcctgactcagcaggttaccgtcgccatccgtttccaggccgctgctgccgatcagattgtcgtagctgaaccgctggtgatctttcttaccgtcctgccagtgcagcagccgtacctgtgcccgcccggcaacaccggcgcagatcacctgatagttttcttttccgcggtacagctccagccccggcagatagatcacctgctgtgtctgtgtactgttgccggttttctgtacggcggttttcagaatacgctggctgcccgcatcataacggtagctttcacggtcaccggcggcaccgttacgcaccaccggcataacctgttgcagttcgccgcgcacagtccatgacagagtttgtcccggctggagctgtgtctgttgtccgcccggggtgaacagggcttccgctttctccggtgtgtccgccagggttttcagtaccgcccggttgctgcgctgactgaccgtgatatccgtggtgtagttattattggtcgcaggtgctgtatggcggatctgtgtcatattcccggcacgatcatagacatagttacgggtgtaattggtgtaactggctttatcaaacggggaaatatcagggagggaaccgctttgctgcccggcattagccatctcgcgcccggtggcactgaccagctgatacagcgtgtcataggtgtatttattttccggcaccactttctgattatgccagaagcgcgtctcctcggcgtcattcgtcacacacagcacattgccgaccggatcgtattcataacgcagatcctgaaatatttttttccgtgccggatgttcggttttgacagcaatcaggcgctgggtttgcggttcataagtgtaagtggtcactacaccgttaccgtgctcctcacacagcttctgcccggcagcggaatacgtcacagacttgataatgattttctccgccccgcctttcaccgtcacccggctggtactcagtaatccggcgatatcataagttactttttgctgatgacccgccgcatccgtggtattcagcaccgcaccggtcgcatctgcaatggtttgtgtggtgtatttttcagctgacagcaaactctccggattgttttccggccagttaaccgggttatccgcatctctcagcaactgacgggtcactgacagcggcactttggtcagcgcaatactctccgtctgcatcagtccggccggatcataatggtgtgtacagacccccgcgaggtttttggctttctccgcctcactgttgcctgcatacacaaagcgctcggttacctgagcattctgcccggcggtctgttccgtgatactcagcggacgcccggctgaatccgcaccttcataccggaaagtctgagtcacggcccggctgcggtcatcctgcccgttatccgtacggatctgactgatgctggtcgccggtcgccctgccgcatcatttagtgtcagcgatgttcccgcatccgcgctttccgtacgcagcacctgtccggagagtgaggtgatatagcggaaattgctcagcccggacgcctgcatacgcggatcagcactctgctgcaaaaaaccgcgcgcatcaaactgatggcgggtaatgcgttcatcagttttatccggggtatccggatggcggtgatacccaatattgcgtacagcctgcctccggttgctcagtaccgtcaccgacggtgtttttttatgtaaggtgttttctgttttgttcattaatagtgtccttttgagaggagggatatctgtccggttctgagatcttcgtcacggacaggcacttattctaaaaataatgaacaaatcaggaagagccaatcgtagcaaaacacgctttattttaaattttcacaataaaaacaattcattaaaaaacaattaattgtatacataaaatataataattaacttatttcataactctcacgaataaaaaaccggagttcacccccggttttttatgacagtcataatcaattatttgtttttataaataatttcgcccttcggctcataatctgccgctttcagcggtgaatgagcttcaatataccctttcagtacttccgcatcgacaaagccggtattgacatagcccgggtgagaatcaatttccggataaccatccccgccgatcgcattgaaattcagtgtcgccatgcggtaggtttttgccggatccagcggtttgccgtcaatcgtcacatcactcacagagccgtctttattcagtgtcagaccgacattgtaaaactgtgcgtaagcacctgaatccgttttcatatttgccacggcggtcagatacggcagcacttcgctgcctttgaaatcgacatacaccagttcgttggcaaacggctgcactttcagcacatttttataggtaatatcgcccggttcgatggagtcacgcacaccaccgccgctcataatagcgaaatcggcatttgcgcgctctttctgtgcggccagcagaagatgccccatactggtctgttcaaaacggactttgctgcgatcaccttccagtttgctgtcaaccgagccgactttgatattcagctgctcattgcctttttcctggtacggtgtcagcagtttaagcatgtccgggctttcggtgatttcactggtgtaatacacccgctctgatgtgccatcctctttggtgacttttttcttcagattcaccgggataagctgatagtgtttcagcgtgaattcgccgttgcggaactgaaagtccgcacgtccgacatatttaccccattcatgtgcctgtacaatccaggtaccgttctggttgtccggtgcacacggggtgcccggtacgtaatctgcaattttgtaattcttgttttccggctgcatacagacaggatcctgcgagtgaccgccgacaatcatatccagataaccggccggcaggctgcgcgccatttccacatctccgggagcgttggagccgtgattgctgtcatcgtagtgccccatgtgggtggcagcgataatgatgtccggtttttccgtttcgcgcagggcttcaaccacttttttggcttcttcagccgggacacggaattcagtgtccgggaagttccccggattaccgattttcgctgtgtcatccgttgtcaggccgattaccgcaatttttaccccctgcttatcaaacatggcatacggcttaaacaggcgttcaccggtgcttttcttatagatattggcggacaggaacgggaatgtggcccatttttcctgagtacgcagcgtttccagcggattatcaaactcgtggttgcccaacgccatcgcatcataaccgaccagattcatccctttgaaatccggctcggcattctgtaaatcggattccggcacgccggtattgatatccccgccggagagcagcagcagtgagccgcccttctcttccacttccttacggataccgtccaccagggtcttctgggcggataagccgtattcgccgtgatcgttctgccagaaatggccgtggtggtcattggtgtgcaaaatagtgatgtcgtaggttttatctttttctcaggcattcgccagcgccggaaaaagcattgcggataccgccagcgcacaggctgtggttttcagtgtaaatgtcatggtcattccctgtgtgtctgaatgatgataccggcacagaaacaactctctccggcgttctgctgaaagtatgatgaaaattcacaaatttttacaccggttatgataaacacggcaagaaagtgcgatctgactcaatgttttgtcatttagcggatccgcacaaatacgataacgcatccttaaaaaatcgttaaatatcaatatacaacagagaaaaatgcctgtttatctgctgcatagaaatgtagttattttataccacgggaatattaccgtaccgtaaccggcataaatatcacgattaaacctgtatttttcagctgatttttataaatacatctgcatcgatatcaaaaacagaccaaatgaacttaataacctgttaattaacaataatattgaagattaaagtaaataaataacggtacgaacggggatcacaaagagcagaatacgctgaaaatagtcaaagctgaatggtatctgctgttaagtcctgttttttacataattagttatatttttaacgcgatttatgtcacgaaaacatgtattatatttatagctaacccacatccgttcacaccactaatcaaaaggagaatgaaaaaagtgcattcaacgcctcttatcacaactattgttggcggtctcgttctcgcttatttactcggtatgttagcgcagcggttaaagatttccccgttagtgggttatctggcggcgggtgtgttagcaggcccttttaccccgggattcgttgccgatacatcactggcaccggaactggcggaaatcggggttattctgctgatgttcggggtcgggctccatttttcactgaaagatctgctggcggttaaaaatatcgccattccgggtgctatctgtcagatagccgtcgcaactattttaggtctcggcctttccagtctgttcggctggggattatttgccgggatcgtatttggtctgagcttatccaccgcgagtaccgtggtgctgctgcgcgccctggaagagaggcagctgatagaaagccagcgcggtcagatagccatcggctggctgattgttgaagacctcgccatggtgttaaccctggtgctgttaccggctgccgcttctatcattaataacccggaggccagtgccagcacatcagatctgctgataagcctgagcattactatcggtaaggtcgtggcattcatcctgattatgatttttatcgggcgccgcgtgattccgtggttactcgccagaacagccgctaccggctcccgcgagctgtttaccctggcagtgctggtgctggcgctgggtattgcttatgccgctgtcgcgctgtttgatgcctcgtttgccctcggcgcgttctttgccggtatggtgctcaatgagtcagaactgagccaccgcgccgcacaggataccctaccgctgcgtgacgccttcgcggtactgttctttgtctctgtcggaatgctgtttgacccgatggtgctgattaaccatccgctgggtgtgctcggtgtgctggcgattattatcatcggtaaatccgccgccgccctgctgctggtgaggatgttcgggcataaccggcggacagccctgacagtcgccgtcagtctcgcgcaaatcggggaattcgcctttatcctcgcgggaatgggggttacgctggaagtcctcaaccgccaggctaatgacctgatcctggccggtgcgattgtctctatcatgctcaacccggtgctgttcacgctgctggaccgctatctggaaaaaaccgaaacaccggaagagcaacaggaagaagaaacgctggaagaaatcacccaggtgccggtcaatatctgcggacatactattattgtcggttatggccgcgtcggtgcgatgctggcggataaactgcataataaagggtatccggttgtggtggtggaagatacccgcgcccgctttgaagagcttgccgaacgcggcttcccttccgtgatggggaatgcggtggcacaggatgtgctggagcttgcccgtgccgattgcgccagtgcgctgctgctgaccattccgaacggctatgaggccggagagattgtcgccaaagcccgtgccatgaacgcgcatatgacgattattgtccgtgcacattatgatgacgagcgcacctatattatggagcgcggcgcaaaccgtgtggtgattggtgagtttgaaattgcccgtgcgatgagcacactgctggtggaaaaccagactgatcatgagttcggctgcccggttaacatcaatccggcagcggaaacagagacggaaggccgctcactgcatgatatgctgcgcaaacctgaaacagatagcgccccggagaaccagaatccgcatccgtcggcataatttgttttaacctgctgaaataacaagcccggattttccgggcttgttatttatgcccggctaataatttcatattatttaatcctttttacagagtctgatacccatagtgagatcagattaataacacctcctgtaatgatcgcgatagcataattaatatctgtaaaaaatgaaaaattgaaatacatttcttttaatatactcaattttaaaagaggaaatacagtgacaaataatattgatataaatatggatataatgactctattttttgttttagtattacccccctgaaacagatgacatttacaaaactcagtaatactacaataaaatactggccggcgtcaggcatcacacctcctctggagaaaaagacactcatccggatgatatggatttatcagaatacatgatcataacagatattatgatcttttatttacgggattcagattatttttacatcacgctggacatcattataagatgaattattttccatttaagttaattttaatatcacaccttataattatgttcgataacatataaatattaattctgtctgacatttatattgttatttctgataaaaaaacgccggataattccggcatttttttcagttattttatcagcgttcccagtatgactcttccaggctgtcttcccggtccggtaaccctttggtcagacgcggtgagtgctgaatcagcacctgatagctgacacggttggcatatttgcagacctgcgccagtgaagagtatgtcagataacggcgctgatgcttactggagttcgggatattcatccggtgatagctgttggccgtaatatcatgcagtaatgcggataatgccccgtcgccggcaccgttggtattcattatcttatccgggccgcccatataaggttcgatatgggaatagacccgtgccgcatcctgacaatctttctgacgcattgcgcggctgaattcataacggttaaactccgccagcgcgcccggtaacagcgggtgggtggtttcgcgcataaattctttttctgaataaccggccatatataacccggcaggacctgcggtacacagcaccagatccacccagtccagggctttatctgacgccagcagcgggtcggcaacgccggtcagtgccagcgcttcttcttcattcatcgccagcacagagacattttccgcaaggaaatcacgccaccactgcggatcttccgcaatcacatgtttggtacccagagtcagaaccaccggaacatcatgtttccgggcatattcgatagctttcatggtggcatccggcatcggttcgcccggtttgcagcgcaccagataagccgtcagcaccagcgcggaggcttcagcaattatcgcttccggaatgctttccgggcgcagctgattcatcagcccggggctgatagcaaatgtccgctcaccgttttcactgatcagggtaaaacagcggccaatcggtccgtcgacaccctgtaaatagttgagatccatacggctggaggtgttgcacagataataataggcatagctgccaatctgaatattattgcacatggtgcccagcagcacagaacggtcgtccgccagaacagaataattgtgaagggtattaccgatagtaccaccggcaaattcatgggtgatcagcgaacgctcaatcagctcacggtacagctcttcagccacatcatcctcaatcaccagcgaatggccgcggctgagctgataacggcggataaaatcatcatccacattggcttcgatatccaccagcgtctgatcaataccaacgatatacgcgcgggtattttcatcatctttcatcagctggacaggctgtaataacgggtcacgcaggctgaccgggaaatagtgtttggatttgcgtctgccggggaatttcataaaggttcatggccggaaaaaaagatggcgtattttatcataacgcggggaagaatgtgagcggacagaaccctcaatgtccgctcaaccggaaattatgctgatttttttctgttaacaaacatattccatgcgaaaaccgccatcactgacagaataaaccctaaaaaggcggatgcgatgagatacattttagtgccggggccgtctttcaccaccggcagatccggggattcggtcacggtgaacggaacaatgttcagtgagaaaggcgcgatacttttgatggttttcagcgcataggctctgtccagaagttccgcatccacagccggtaaatccagagctttcagggagtctctcatctgcatcactgccggacgccccatggcactgtaagaggcaaccgggtcagcttccggattctgaggcggaacagatgccgccgccggtgcaacccgttcagctgcagccaggtaagccagcgtttgctcccgctgatgttccgctctcaccagcgccacattatactgactctgaccggcactcagcgcagcggccaggttttcctgtaactgcgtctgcatcacattctgactgtattgtgcggtgtaatcgaggtaatccgacaacatttgctgtgctgtttgcggatctgccgcagtgaagctcactttggcagtagccggtttcagtatatcgccgtccgttttctgaaaaccaaaagagccggaaacagcagtatcgccctgtgagaggcggaatgattcctgtactgacggcgactgccagacagtaccgaacacattaaatgcagccggcagatcagataccgcagtcacattgagtgcattcatctgctggctgactttatccagctccggcatgtcacgaagctctgttgccgtcacttcggcggtactggtccatttctgcggcagtattttggagacaccgaacccggcggcagcgaataatacggtcacaatgacgataaaaaccttatggcggtataacagtttcagcagatcaataatatcgatctcgtcattattcaggttcactgaacccttctcattcaccatgtccgtagcacctgtcctgtctgcgatgaagtactgaatttcacttaaaatgaacaataatatctgtcattttcagctaattaattgttacatgattaatgttaacattaatttcataaaattctacgcataacagtggtatatttcggactattccagattggaatgcgaaaaaactagccaaccaactctcgcaacagctttatatgaatatcagcgtcattaagggactgaatgtaatgatattccgccccgccggaagacaaaaataatgctttattctgttccttaatttcctctaacgtttccaggcagtcagccgaaaatcccgggcacatcacctgaacagatttcacgccttttgagggtaataacttcattgtttcatcagtataaggcgtaagccacggctcacggccaaaacgggactgataagtgtgcatgatatgttcagccggaaaattgagcctttcccgcagcaatgtcgtcgtggcctcacattctgccgggtaaacatcaccctctttcgcataacggacaggaataccgtgataggataaaatcagccggtcaggcaccccgtgctccgcaaatgcggcctccgctgactgcgccagtgcctcaatatagagcgggtgtgtcgcgtaactgcggataaaatgcagtgacgggaatgtccggcggcgtttaaagatatccgccagcccgtcaaacaccgcagcggtggttgagcaggaatactgcgggtacagcggcaggacatccagatgtgtcaccccctgtgccagaagggcatcaacggcggattccagtgatggtgaaccatagctcattcccagctccaccggtgtgcccggcatctgtgccgccagtgccgcctgctgacggcggctgtataccagcagcggggaaccctcttccatccagacagactgataaagcttcgccacacgcggcgagcggaacggcagcacaataccgcgcagaatacactgccagagcagcggagagacatccaccacacgcggatcactcaggaactgcttcagatagcgttttaccgccggggtttccggtgcatccggagtacctaagttaaccagtaaaacgccgcgtttgtgttgatttgtcatcagaaaatcctgtcagcaactgagaatgattgtcagggtaatgcattgtatataatgattcttattcttttctgccatgttcttcatgttcttcatccttttgtccgcaggttcgttggctgctggttcaccggcggcgcaggataaaaaaaggcagccgtttggctgcctgacagaaataagtgccggattaacccagaatacgggctaattcctgactgacttcgcttaccggacgggtgccgtcaatacgattgtatttcacgtcactcatctgagcttctttctgatagtactggatcagtggtgcagtcagctgatggtattccaccagacgcttacggacggtctcttcctgatcatctttacggatggtcagttcttcaccggtcacgtcgtctttattttctgtcttcggcggattgtattttacatgatacacacggcctgagcccgcatgtacgcggcggccgataatacggtcaacgataatttcatccggaacatcaaattccagaacgaaatcaacggtgataccggcttctttcattgcatctgcctgcggaatggtacgcgggaacccgtccagcaggaaaccattacggcagtcatcctgtttgatgcgctctttaaccagtgcgataactaatgcgtcagtcactaatttgccgttgtccatcaattcttttgcctggagacccaattcactgccggatttcactgctgcacgcagcatgtcacccgtcgagatctgagggatcccgtatttttccatgataaactgagcctgagtccctttaccggcgcccggagcgccgagcagaataatacgcattgcgtaaaccccttgctggttgcttttttataattcggataaaaacaagctaccataccatttgtcagggtatggactcaagaaaagcggggaaactctgacgttcgtttttcctcatttcaataaaaaaaccacatgatcgtcatgaaatcatgtggtttttaagcgggttatgcgcgattgtgctcacccggcgcgggaacgcctgtttttagcctaataacagactattcatccgggaaacaaattcgttcggatcttccagggttccgcgttcaacaaacagtgcctggtcgagcagcagattgatccagtcggcaaagcggctttcgtcctgctgttctgcggccagtttcaccagcggatgctccgggttcagctcaaagttatatttcacttccggtgcctgctggccggcggcggcaaacagtttcgccatctgagtgctcatatcatcggcgtcggtggtgacaatcgccggggtggaggtcagacgatgggtcagtttcacctctttcacacggtcgccgagcagtgttttcacacgctcaacaaacggagccagctctttatccgcttcttctttcgctgccggatcttcatccgccagtttttccagcgattcatcagctttgctgacagactggaaggttttaccctcaaattcattgaggtaattcatcatccactcatcgatacgatcggagagcagcagcacttcaatgcctttcttacggaacagttccaggtgcgggctgtttttcgcagccgcatagctgtctgcggtgatgtagtaaattttctcctgaccttccgccatgcgggatacataatccgccagggaaacggtctgcgcggaggtgtcttccttcgtgctggcaaaacgcagcagtttggcgatcagttccgcattggagctgtcctcgcccggaccttctttcagaaccaggccgaactgctgccagaatgtctggtatttttccgcgtcattattggccagtttttccagcatctgcagaacacgtttggtcagggcgctgcgcaggctgcgggtgacggcgctgtcctgtaaaatctcacgggaaacgttgagcggcagatcattggaatctatcaggccgcgcacaaagcgcagatagttcggcataaactgttccgcgtcatccatgataaacacgcgctggacatacaggctcaggccacggcgctggtcgcggtgccaaaggtcaaacggagccacggacgggatatagagcagactggtgtactcctgcttcccttccacgcggttatgcgcccatgtcagcggatccgcaaagtcatgggagagatgcttgtaaaactcattatattcttcatcactgatgtcgtttttattgcgcgtccacagtgcctgagctttgttgattttctcccagataacggtgccgtcttcttcatttttgctttcgatttccaccggcagcgcaatatggtcggaatatttgccgataaccgagcgcagacgccagtcatcgaggaactcatcttccccttcacggaaatgcagggtgatttcggtaccgcgtgaatctttatgggttttggcgatagagtaatccccttccccttcagattcccagaacaccgcctgatcagacggcacacccgccgcacgggtgatcacagtgactttgtccgccacgataaaggcggaatagaaacccaccccgaactggccgatcagctggctgtctttggccgcgtcagagccgagtgattccaggaaagctttggtgccggatttggcaatggtacccaggttgtcgatgacctcatcgcgggtcatcccgataccgttatcactgatggtcagagtgcgcttttctttatcagcggacagccggacatgcagatcaccgtcatttccatacagtgaactgtcggataaggcacggaaacgcagcttatcggccgcatcagaagcgttggagataagctcgcgcaggaaaatttctttgttggaataaagtgagtggatcattaactgcagaagttgttttacttctgactgaaaaccacgggtttcttgttcttgcagactcatgaataacctcaaactgacttatcaacgaaaaaaaacaggataaaaatcaggtgggtccggtctttgggttttcaaggcaaacggggaattttttgtgacaattctgaggaaaagtgacagacggcacaggccgtctgtccgggtaacaggcagaaaccgccgtcagtaatcgctgttgtaacggattttctgacgtccggcgatggagtgggacaaggtcgtgccatccaccatttccagctcaccgccgaccggtacgccgtgggcgatacggctggcggaaacatcatactgcgcgcacatttccgcaatatagttggcagtggcttccccttccactgtcggattggtagccaggatcacctcagtgatggtttcctgagacagccgctcctccagtttatccagcccgatatccatcggaccgatgccgtccagcggtgacaggtgtcccatcagcacaaagtagcggccggagaactgccctgtctgctcaatcgcgtggatatccgccgggctttccaccacacagataagaccggtctgctgacggcgcgggttggcgcagatagtgcactgttcctgctcggtaaaggtccggcagtcccggcagtggccgatttccgacatggcacgggtcagtgcctgtgccagacgcatcccgccgctgcggtcgcgctgtaacagctgaaacgccatacgctgtgccgatttcggcccgacgcccggcaggcagcgcagggcgtccatcagtgcttcaagaagcggactggtttgcatcagaacggcatcttaaagcccggcggcagctgcattccgctggagactgacgccattttttctttctgggtttcgtcgatacgacgcgcggcatcattgaatgcggcagcaatcagatcttcgagcatctctttgtcgtcttccatcaggcttggatcgatttccacgcggcggcagttatgtgcgccgttgatagtcactttaaccaggcctgcaccggattcaccggtgacttccgtatttgcaatctcttcctgcatctgctgcattttatcctgcatttgctgggcttgtttcatgagattgcccaaaccgcctttaccgaacatagttttctctctttgactaaattgcgtattctaacgcaaggtggttaaacaggccggatactctcttcatccagttccgcatcaaaaaaggtcagcagagtctgaatggttttatccgtcacaatggactgacgcgcctgcgccagcatctcttcatagatagcctgccgccattccagcggcgttttcatgctgacatcatcgtcttcacaaattgtgagactgataactttaccataaagttcactcagtgcatcactcagcacgctgtgtgctgattttgaattcaggtggcgctgtgaggtgcgcagatgcagacagatactgtcttccccggtctgctctttcaccgcgttcagcgccagttgctgcaccagtttcggcagctgcattttatcaatatccgccgcccacggatcccgttcccgggcagcaacagccagtttttcagccacttccggcgttttttcgtgctcaagggcttttttgatatctttcggccgcgcaaccgggagtttctcttccggttcatcctgtttctgcggacgccactgatacggctgcggtttaccggatgctttcggctgtggtgcagacacagcacggccccggcggttttcagtcacggcagcgagtcgctccagtgctgagttcgccggtttacccttttcagttaaggtaaccggctcagacttttttgacggcgggatctcctgccggttcagtgcgtcacgggctttcagcaactgggcggtcgggttgttttccgtttcctgcggtatcgccggcggtatgctgcgcgccggtgcgtccggtgccgctgtctgcggttgtgacggcagggaaaccggtgccacggacggcgcggtgatcacttcatcaatcacattacgcggatgaaatgccagtgcgcgcagcagtgccatttcagcgcccatgcgtctgtcaggggcatacggcagctctttgcggccgaccagcagtgtctgataatagagttgcagatccgctggggcaatggcccgggccaggatgcgcagacgttcttctgtcaccccggcactgttatcctgtaccggcagcagttgcagcatggcgattttatgcagcgcggccagcatttctgtcagcaggttatcccagtccgcgccccgtgatgcggcatcattcacgccgttcatcacctgaacgccatcccctttcaccagggcttccaggatagtcagcggctgttcgtcgtccagagtaccgagcatctgcgttaccacgtcggtggtcacttttccggcccccagggcaatcgcctggtccgccagactcagcgcgtcacgcatactgccgtctgcggcacgggccagtaacagccgtgcacgggcatcgttttcaatctgttctgcggtcagaatggtatcgagctgctgactgatctgatccacatccagcgctttgagatggaactgtaagcagcgggataaaatcgtcaccggcagtttttgcggatcggtggttgccagcaggaatttgacgtgctccggcggctcttccagggttttcagcagcgcattaaagctgtgacgggagagcatgtgaacttcgtcgataagatagactttgaaacgcccgcgcgacggggcgtactggacgttatccagcagttcacgggtatcttccaccttggtgcgcgatgcggcatcgatctcaatcagatcaacaaaccgcccctgctcaatttccaggcagttctggcatttaccgcacggcgtggccgtgatgccctgttcacagttaagacctttggcaaacaggcgtgccagggtggtttttccgaccccgcgggtaccggaaaagagataggcatgatgcagccgctgatgttccagcccgtttgcgagcgctgtcagaacatgctgctgaccgataacctgtgaaaatgtttgtggtcgccacttacgggcaaggacttgatagctcatggattccgcagagagtgaacatgattttccatcatgctaccacagcctcaccacaatgggcgaggctgagtttgcgtttaatacggggagagactcagccgccggcatattccagcaggcagaagctgtgcacaccttccgcttcaaggcgttccgcgccgccgagatcaggcaggccgataataaaggctgcttcatgcacttcaccgcccagacgacggatcagacggatagtcgcattgacggtaccgccggtggccagcaggtcatcgacaaccagcacgttgtcaccactgctgatgctgtctttatgcatctccagggtatcagtgccgtattccagatcataggtctcgctgagggtaccacacggtaatttcccttttttgcggaccggcacaaagccgacacccagacgtaacgcaaccggtgcgccgaataagaatccacgggcttcagtgcccacgactttggtgatccctttgtctgcgaaatgctccaccagcatatcaatcgtcagacgataggcttccggattggccagtaatgtggtgatgtcgcgaaacagtaccccttccttaggatagtcagggatagtccggatactttctttaataaattgcagttgttcagcagttgcgctcataatgggtgccatagagataacacgaaacctcagaatctatgcaaatcaggggaaaattgcaaccgtatcccgtgactttgccgattatttgttgttttatatcaaacagactaaaaaatgcttctgcaactatagatcctcaacagatcctcaacaacgatcccgggcacatttcactgaggcggataatgaacaccagacaattgttacaggcgctgcggcagaaaatcagcgcgctggaagagcagattgccccgatagcagaccgggaactgagccagcgccgcttcgatgataccctgttcgccgcccgtaataaaaccctgcgcctgtgcatggatgaattactgcaccatactgaccagctggcgcagtgtgcggatgaaaaccgggctgaacaggtacgttttctggcggaaaaaattgtcgcccagattgcggcactgaaccgcgaggccgccactcaggcgctgcgccagaaagaacagagctatgtgaaacgggacagccaggtggatctgtatcagcgtctggcgcagcatcaggattatgagcgccgcctggctcagatgaccgatgaccgcgaactggcactcggccgcgcacagacctttgccgaacagcaaaaaatccagaaagagctggcggctctggccggacgccttgtccgctgccgtcaggctttacagcgcatagagcggcagattgaacgccacgacggcaccgaattttaatcagataccggataccccatgagtcttgaaaatgcccccgatgaggtaaaactggcggtcgatcttatctgtctgctggaagagaaccgcatcccggccgcaaccgtgctcgcggcgttacagattgtccgccgcgattatgaaaacaaactgcgcgatacagagaacgatcaggccggctgagcgccgtcatccttctcttttccctgcacctgtacttctttgccgctgttctgatcgtggagatacacttccagctgattgaaggcgatattaatatcgttttcgcgcgccatccggtcaatcgcgcggttcacttcatccgtggtggcactgcggtcgccgatagtgcgcacatagaaacgcagctggtgatcgaggctgctggcaccaaactcggtgaaatacacacccggcgccgggtcggtcattactttcgggttatccgtagccgctttcagcaagacctctttcaccttcgccagatccgagccgtaagccacaccgacattaatcacaatccgcgttaccgtatcagagagtgaccagttggtcaggcgctcggtcataaaggctttgttcgggataatgacttctttgcggtcaaaatcaatcaccgtggtcgcacggatgcggatcttgttaaccgtaccggagaaagtaccgatagtgacggtatcgccgatacggatcgggcgttcgaacaaaataatgatacccgaaacaaagttagcaaagatttcctgtaacccgaagctgagaccgaaggttaaggctgctgccagccactgtaatttaccccacgacaccccgagggtgccgaacgcggcaatcgtcccgatcccgacaatcagataagtcagaatggtggtgatagcgtacgaggtgccctggcgcagcgagagccgcgagagtacaaggacttcaagcagaccgggcaggttgcgcatcattatccaggacaccaccacaatcaggacagacaggatcagatccccgagcgtgattgcctccaccacattccccagcgcggtatcgacgttgtaatgccacagcgtgatactgtcaaagaaggagaaaatggtaataaaatcagaccatatgccgtagaacgccgctgcaaagacaataaacagaaccatcgaggtcagacgcagtgactgctggttaatcagctccatcgacatcggcggctcttccacaatcacatccgggacatcatccccctcatgctgctctttatgctgaacctgctgtttctgccggcgggccagcgcacgctgataggtcagacgccgtgccgccagtgccaggccgcgcagactggtatgatagacgatataccacagcagcagcagatagagactgtctatccagcggctgctcaggcgcagtgccgtgtagtaataccccagcccgaccagcaccaccagtaccagcggggagaatgtcagtaaagtcagcaggaacgcccgcaccagatgagagcccttctcgcgccagatttcaatgcagaacggcaatgtgaatgcaaagacaaacaccagtgccaccggcaccaccagctgaccaatcacatcatccaccaggcgcagcgggtattccatcccgtaagccgcccacagcataatcggcagcagcggcagcgccaggcgcaccagtctgcggcggccggtacggcagatttcaggatcgatcccgaagtgtgtgactgcaattccctccggtttcataatccggtaactccactcgaacagcacccagaagagagccagctggcgggagatagtccacatcagtgcggaatccgcactgccggttttcaggcagaaatagccgaaggcaatcacaaacagtgaggacggcagggttttgatcagcatcagtcccagcgccattggtgtgtagatctggcggtcttttttcagccgcccgacatcagcattaatttcagcaagtttggtatcaatattcttggtgccgaaacgcagcagcagcgcaataatcagcagcggaatagtaataaagagggaatcgacaaaaccgttgatcaggctttgcagcgaccagttcagatccagtgacgtcagttcctgtttggccgcgcccgggaaggactggaaccaggccaggttgaccggtttgttactgttgacccagaaaatctgctgcgcgagggttttctccagtgaggccaccacggtgaccagttgagtctgatccagctgcaggttaatcgcctgggaaatctggttacccatctgggtattcagctgatccaataaatcctgacggacagacaccacctgcatcagcgcatgtttctgagcccgcagctctgctgcggtcgccggcatatcatgggttttggcgtactcgtcaatcatggtgctgacaaagttgtccggctgataaagcttgtcgcgctgctggttgatttcaaactgcgccagacgcatatccgcaatccggtccggcaaatctttaatcagcaaatccggcggcaggtagatctgctctttaaacaggatacgggagagcagcaggctgccgcgcagcacggtgatctgctctttgaggttgcgctcggattgcagtgcgcgatccagaatactgcgtaccttaatagagcgctgcaccaactggttattatcgcgggtggcggcgaccagtttttcacttaaatcatggttgagcgcgatttcacgctgcaccagcggatcatcctgcatattgcgctgggtatcatccgaactctgcgcctctttggccgcctcttccgaataatccagccgcttgccgctgaccgtttcctgaattacatcaatattactttccagctgtttgatgcgctccaccacatagtcacgctgcacctgcagcagattctgtaactgggtgttcgactgtaatgcccgtttctgataatcaatctgctgctgtaagtaatactgctccacctgaagggcttcaatttccgtcggccgcagcactttctgggccgccatcgaatcattcagcaggacgcggatctgctgcagacgctgcacattaccgtacataatattctgtgcgcgctcaggctgagtctggagagcaatcagatcactattataagaagagaggttattctgtgcggtctgcaacgcctcaagggtgctgttaagtttcagctccagttgcgagagcggcagattttcaatggaggcccggtattccgccagtccttcatcagttaatgattttatctgcgttaatttttgtgtgacctgatctgacagtttcggggcttcatccacccgttttttcagtgcctgtgatttttctttcagggcatcgagattgtcataaaacaccagcgcccgctccagatcctgcactgacagcttatcagcggcagtctgttctttgcggttattcagggcattgagttcggtctgaatggtgttgcggtcaggaatatcctgtacggccgccaccgcgctgttctgaaccagcaccggcagcagaaatatgaaacaggtaaaaagacggaggaaaatctgcctcagcagaccggaagccgggacacggctgattcgcttcataataatatccacctgtatctgcccttccccggctgtctgtttcaggttatctgattaaaaggtaatgattttttctgcatcaagtgaccactgcgccagctcggccagtgtcccgacctgcacgccgtccaccagcggaagctcagtgataccgcgggcatcggtgcaggttttgcacagcttaatgtctgttttctgtgccaccaggatctccagcatctgtttcaggttataaccctctttcggctgctgaccgcgtaacccggcaaccaccgcatctgacatcagaaaaacattcatcggcacctgactgtcctgctctttaatcgcaattgccagacgcagtgcgttaaataaagattcactgccatacgcagcgccattggcaataattaatacaggcttcatacatgatatccttaaggttaatgttataaaatgtaaatcaggcgtctgccggcggtagctgcatatttttactgagcattaacatatccagataaccgtcaaccaaatattcagcctgcccgctgatattaaaactctcgctggaaaagagccagttttctaacagcccggttatcattccgcgcagcatgatggcggcacgacgcaggtcgagagttgaaggcagcagccccagtgtgacactttcaatcaggaacgactctattcttgagtattccgcagcatataaattttgtctgatggtaattaattcgctcatttcaccggtaaattcacatttatgaaatgaaatgctcagaatagcccgcattttgggatcggaagccacagacgtcagaatgtaaattaatattttcttaaacactaaaagtggattatccgggtattttgcccgatactcttgttcaataaagccaattttcgtatcggttatcgaacagacttcagtaaacagatcaactttatttttgaagtgccaatagatcgcaccacgggtcacacctgcttgttttgcaatatccactaatgacgtcgcagacacgccctgctcactgaaggcggttaacgcggcatcaataatctggcggcgggtttctccggcctgttgtttagtttttcgtgccatgtaaggcctgtgtcatctgaagttaatttacatacattcgtgtatgtttgtattatagcacgctgatttattagttaatcaaccatatttaccggttaaaaatcgacattttatagaggtttactatgcgaaaaaacagaggcgttctacctctggcgatgctcgttctgtccgggagctttctgctgtccggatgtggtgaagagcagaagcaagggggcgaaatgccaccgccggatgttaaagtcgtcacactgaaagctgcaccactgacagtgagcacggaactgccgggacgaacttctgcttaccgcatcgcggaagtgcgccctcaggtcggcggcattattttaaaacgcaactacaaagaaggaagtgacgtcaaagaaggcgaatcgctctatcaaattgatccggctccttttcaggccacgctgaacagcgcgcaggctgaactggcaaaagccagagcgaatgccgaactggcccgcctgacagtgaaccgctataaaccgttgctgggaacaaactatatcagccgccaggattatgatgaggctgtctccacacatgcacaggctcaggctgcggtccgggctgcacaggcagctgttcagacagcacaaatcaacctgaactataccaaagtcacttcaccgatttccggtctgtccggtaaatcaaacgtgactgaaggtgcattagtggcaacaggtcagagccagccgctgacactggttcagcagattgaccctatctatgtggatgtgacccagtccagcgatgattatctgcgcctgaaacacgaaatcgccagcggtgccgtggataaagaacagggcaaagttgcggtcagcctggtgacagctgaaaacaaagattatacccataaaggttatctggaattctccgatgtgactgtcgacgaaaccaccggctccatcaccatgcgtgctgtgttccctaacccgcaggaatccctgctgccgggcatgtttgtccgcgcccgtgtggatgaaggtgtgcgtcctgacgccatcctggttccgcagcaaggggttatccgtacagcaaaaggcggtgcggtggttaacgtggttaacgccaaaaacgaaatcgaagtccgtccggtcactgtcggccaggcatatggtaacaaatggctggttaccgccggtgtgaataacggcgaacgtgttgttgtcgaaggcttccagaaaatcaagcagggtgctgtcgttaaggcaacagaggtggatttaaatgcacagccggcaacagctgcgccgaaagaaactgaatctgccaggaagtcccaataaggagtcagtgattcatgccaaagttttttattgaaagaccgatatttgcatgggtaatcgccattattaccatgcttgcaggtctgttggcgatcatgaaactgccggtggcacagtatccgactgttgccccgccggcgatttcgatttccgcaacctatccgggtgcggatgccgagacggttcagaatacggtaacccaggttatcgaacagaacatgaacggtatcgacaaaatggtgtacatgtcttcaaccagtgactcagcaggtaacatgagtatctcgctgacctttgaagctgacgccgatccggatattgcccaggttcaggtacagaacaaactgcagctggctatgccgttactgccgcaggaagtgcagcaacaggggattacggttcagaaatcaaccagctccttcctgttggttgccgcgtttatttccgatgataaagacatgacgcaggatgatattgcggactatgtcggttcaaacgtgaaagacccgctcagccgtgtaaccggtgtgggggaaacccagctcttcggtacccagtacgccatgcgtatctggctcgatcccgataaactggtgaagtacaacctgaccactgtcgatgttatcaattcgattaaaattcagaacaaccaggttgctgccggtcagctcgggggaacgccctctgttaaagatcagcgtctgaacgcatcgatcattgcacagacccggctgaatactcctgagcagttccaggaaatcatgctgcgcgtgaatactgacggttctgttgtccgtctgaaagacgttgcttatgtggaactcggtgcagagaactacgggattatcgcgcgttataacggtaaaccatctgccggtatcggggttaaacttgccacaggggccaacgccctggatacagcaaacgcagttcgtgaaaaactggctgaaatgcagccgtatttcccggacggaatgcaggttgtttatccatacgatacaacaccattcgttaaaatctccattttcgaagtggtgaaaacactggtcgaagcaatcatgctggtgtttgtggtgatgtatctgttcctgcaaaatttccgtgcaacattgatcccgactatcgctgttccggtcgtgttattaggtacattcgccgttcttgccgccttcgggtattcgataaataccctgacgatgttcgcgatggtgctggccatcggcctgctggtggatgacgccatcgtggtggtggaaaacgttgaacgtgttatgcaggaaaccggcctgccgccgaaagaagccacaaaagtatcgatggggcagattcagggtgccctgatgggtatcgccatggtgctttctgcggtatttattccgatggcgttcttcgggggttcaaccggggcaatttaccgtcagttctctgtaactatcgtatcagccatgatcctgtcagtattagtggcattaattctgacaccggccctgtgttccaccatgctgaagcctatcaaacagggcagccacggtgctcagaccggattcttcggctggttcaaccggatctttgagaaacagactcaccactatactgacagcgtgggtcgcatgctgcgcggtaccggtcgttatctgctgctgtatgttgtgctggttgcagccatgattgtgatgtttgtccgtctgccgtcttccttcttaccggaagaagaccagggggtattccttgccatggttcagttacctccgggctccacacaggaacagactcaggttgtccttaatgaagtcagtgattacttcattaatactgagaagaatgtggtggaatctgcctttaccgttaacggcttcggtttcgccggtcagggacagaacatgggtctggctttcgttgtcctgaaaaactgggatgaacgtaaagcgaaagaagataaagtggaagctattgtcggccgtgccaacgcgaaattcagccagaattcaggcgccattatttatgcgttcaacattccggcaattgttgagctcggcacatccagcggctttgaccttgaactgatggacaatgccaaccacggacatgaagctctgactcaggcccgtaaccagttactgggacttgcaggcaaacatccggatatgctggttcaggttcgtccgaacgggatggaagatacatctcagtatcatctctatgttgatcagcagaaagctgaagcattaggtgtggacatcagcactatcaatgcgacaatgagcaccatgttcggcggaacatacgtcaacgactttatcgatcgcggacgtgtcaaaaaagtctatattcagagtgatgcacaattccgtatgcttcctcagaatatttctgaacagtatgtccgcaataacaacggtcagatggttccgttctccgcctttgttgatacgaagaaagatccgtggtcatttggttcaccacgtctggagcgttacaacggtttaccggctatgcagattcaggggagtgccgcaccgggtaaaagtagtggtgatgcgatgaacctgatggaagacctggcaaaagaattgccgcctggcttcggcgttgagtggacaggtatgtcttatcaggaaaaaatgtccggtaaccaggcgcctgcgctgtataccatctcactcattatcgtcttcctttgtctggcagcgttatatgaaagctggtcggttccgttctctgttatgctggtcgttccgctcggggttatcggcgcgctgttgctgacccatgcacgcgggctggaaaacgacgtgtacttcaaggtcggcctgctgacaaccatcggtctgtcggcgaagaacgccatcctgattgtggaattcgccaaagacctgatggagaaagaaggtaaagggctgattgaagcaacactggaagccgttaagatgcgtctgcgtcctatcctgatgacatcactggcctttatgctcggggttattccgttagtcctgagtaacggtgccggttccggtgcacagaacgccgtaggtacaggtgtgttcggtggtatgatcgccgcaacctcactggctatcttcttcgtaccggtcttctatgtggttatccgccgccgcttcagtaagaagaatgaggacattgagcatgctcatgcggtaacgcaaaagagcgatagtcctgacggattttaatcctgcttaaacataaaaaggtcacattagtgaccttttttatttttttgacatgatgaatatttttaaatttgagtaagaaaaacttaaataaacaatagatgaatgtaaattataacattttgcaaatgtaaggttttgtcataacacgttatgattcatcacctgccctttcccataaaaattcagtaaatttaagcagatgagtaattataacctgtgtatcagcgcatttattctgcatttaaatttactttttttgtattttggctagtgacaagagcggaaatagtgttatattactaacagggttaactcagacctttttattcacatctttttccggaacatcacgttcactgactgaaacagattaacacgtaatcagcgtctggttatccgcttgtgctgaacggaactttacattacctttatttataactaaaggctgatgatatatataatacaccgacgtcgataacgtaataacttactcatgtgttaattataatttaacgtttttcagcgccttatcattcccggttacattcaggaggtgattatggacgagtattctccacgaaattacgatattgcggtactgaagtatctgtgtgatgaactttgccgtgaaggcacacaaaccctcatcagaagcaataattattgggttaatgatttagcctcagattcaaacttaaaacttaacgaattattaggttacattgctgacgtggcctggagttttaagataaaacatacacaaaataaggatctcatctcatttgtcgatgaatacatcgatgaaacttacgcgctgtttggtcagatggaagtttcgtttaatgacgttgaggaatggaagaagatggcatcactggtaagcagcatgctgaccagcgaggggcatcttgtccactaacggaatacagacttatatatcagtatattgcgtactaacaactcagcaagaagataacatatgatgactaaactggactatctcatgcgcttacgtaagtgcacttctattgaaacactggaacgtgtcattgagaaaaacaaatatgaactgactgatgatgagctggaggttttttattcagcagccgatcatcgtctggccgaattaaccatgaataaactgtatgacaaaatcccggcatctgtctggaaatttgtccgttaattcaaactgctgtaaccgcctctctttcaggcaatagtcttatttttagtgatcccgggccaaaggcacagctgactgactttggcttccgatcatgcccgctatttatcccgctattctttacgtatattacgatacagatataatttataacaaaagcatatattttatgtttgtttcactcaccagattattaaatgacgatacccatttattaaactcaatgtatagcgaaaatttcattttcactgtttaccactataatgggttaaatcaaaaataagatttttacctgaacatgcgattttatgtgaaactctctcttttacactaagaacataaaacaaattttacctatattgctatatccttatatctgatgttgcccgctgaatgccggagtttgtgcggacagggataatgttaaattatgaatatatgaataatatgcgccggatgaataacgggagaaactcgctgtgcagacagaggcaaacggtatcaataacgggataatcacagagacgggtacaacagaaatgggtgggggccttgccagcgacatcccggcacacaattcccctgctatggctgcttccttccggacctgaccgagttaacaagttcatgttgcgggagaaccaacaaagcccccataggaaccctcaataatgaggctgtgccattatccgggatcagcactgaaatagcaaggcaaccggtgctgaccgctgtatttttacacactactgacacaacgacatacctctgccggtcaggaaccgcacataacggcggtttatcatttttcaattgcactgacagcgattagaatgaccgcttcctgctgaaaatacttaataagggtaaccatgagcctggcattagaaaatctgataaacctgatggcactcgaaaaactcgaagacgggttattccgggggcaaagtgaagatctcggcctgccgcaggtctttggcggacaagttgccggacaggcactgtatgcagcgggacagaccgttccggctgatcgccgcgttcattcattccacagctattttctgcgccccggcgacagccataaaccgattatttatgatgtggaaaatctgcgtgacggcaaaagtttcagtgcccgccgtgtcagcgcgattcagaacggaaaaccgattttctatatgaccgcctctttccagggggaagagagcagttttgagcatcagaatgccatgccggaagttccgggccctgacggactcgcctctgaaactgatattgcccgcaagatcgccgcgaatctgccaccgaaaatgcaggcactgttcctgcgtgagcaggctattgaatggcggccggtgcgtttttgcagcccgtttcagaacccggagaatccgccggtgcgttatacctggctgaaaaccaacggcaccataccggatgatcaggcgctgcatcagtatctgctcagttatgcttctgactacaatttcctgccgactgccctccagccacacggctacggctttatgcagccggaaattcagattgccacgattgatcattccatgtggtatcaccgcccgttccggctggatgaatggctgctgtatgccgtggaaagcccgacagcgtccggcggacgcgggtttgtccgtggtcacttctataatcagaccggcgtgctggttgcatctactgtacaggaaggcgttctgcgcttgcgggatatttaagcgcctgcggtaaaaaagcccccgctgtacatcggtgagcgggggcttactttttttcagctatgagcggttataggcctgttcaccatgcgtactgatatccagcccgctgatctcatcttcttctgtgcagcgtacaccggttgtcagtgccgcgcatttgaatgcgatgtaagtaatcactccgctccagagcacagtaaccaggatgctttccgcctgaatccatacctgatgcagcatagtgacaccttctgcatagccggtaccgccgagagcagacgcagtaaacacgccggtcagcagacagcccgcaataccgcagacgccgtggatcccgaagacatcgcagacatcatccgctttcaggcggcgcttcagtgcagtgacgccccaataaccggcaataccgctgataaggccgataactatcgcccccgcgacgcccaccgtcccggccgccggggtgatcccgaccagaccaccgatacagccggaacacgcaccgagaagtgagggcttaccccgcatgcaccactctgcaatcacccacgccagcacgcccgccgccaccgcaatcacggtattcagaaaagccagtgctgcaataccatccggttttccggccgatccggcattaaacccgaaccagccgatatagaggatcgccgtaccggtaaataccatcggcagactgtgcggtttggtggcggttttccccggtaacaggcgcggtcccaatatgtaagcaccaactaacccggcaaccgccgcgttgatatgcacaacggttcccccggcaaaatccagtgcaccatcttccgccagccagccgccgccccaaaccatatgcgccatcggtacataagccagagagaaccagataacggtgaacaacagaaaggccgtgaatttgatccgttctgccagcgcaccggtgataagtgcaacagtaattgccgcaaaagagccctggaaaataacatgtgtcagctggctgatactgccgctgttactgacaggcgtgatcccgctgagaaatgcatgagacagaccgccaatcaccccatttccgtcagaaaatgccatgctgtagccataaaaaacccataacagcagcaccagcgcgaagctgacaatcacctgtgtcatgactgataacacattctcacgtcgtaccagtccgccgtaaaacagcgcgataccgggaagtgtcataaaatacaccagtgcggcacaaatcagcataaaaccattatccgcacgctccattccttccgttgcactgaatgccggaagcggcagcgccgcggacatcacaacaggcaagaccatttttcgtttcatcatctgagcatctccgcgcggtttaaatagcttcatcattttgttcaccggtacggatccgcaccgcctgagtaatgtctgaaacaaatattttcccgtcaccgatactgccggtatatgccgagcggcaaattgcctcaataatgcgatcaagagaatcatcaggcacaacaatcgtaagctgcgtcttcggcagaaaatccgtgctgtactcttccccccggtacagctcagtgtgccccttctgtctgcccgcaccccgtacttccagtacagttaatccctgaataccctcttcgttcagcgcatctctgacgtcattaagtttaaaaggcttgatgatggccattatcattttcatcgcattctccgcttcaggttgctggtgtcctgaggacaaattgcaaaagtgatgccaataagcagaatggaaattaaatctattaattacaatgagataaaaataaaaaaggtgtctgattcatcagacaccttttcctgtgatgcggggattgcacttttttacagcatcatgcacctgtttatgtgaacgatctcacaattatagtgcaggggtatagttctcttccggggcgttgagtgattccccgacctgctgcagctgatacatctggtaatagcggcccttctctgccagtaacgcccggtgagagccggattccgccatttcgccgcggttgagcacataaatggtgtccgcatcgacaatcgtggacagtcggtgtgcaatcaccaccagtgtggtttcacggcggatcagctgtaaggctttctggatagcctgctcagtaccggaatcgatattggcggttgcctcatccagtatcaggattttcggggtctgcaccagcacccgtgccatggccagcaactgtttctgcccgtcagacaaggtgttaccctgctcacccagttcggtatccagcccgtattcaagctgtgagacatgctcactcagctgaaccatctccagcacccggtgaatgcgctcatcatcaatatcccgtccgagggtgatattgtcgcggaaagaggcggccataatgaccggatcctgctgcaccatcgcgatgccctgccgcagtgctttatgtgagaattgttccagcggacgcccaccgaggctgatttccccggcctgccacggatagtagcccatcagcaggtttgccagtgtgcttttcccgctgccggtatgcccgacaaaggcgacaaaactgtgctccgccacatcgatactgatatcacgcagcaccggttttccgggttgataggcaaatgtcaggtgtgatacacggatactgccgccggtcagcggctgatcatctgccccgtatttctgctgcgggctgtccatcagctcaaaaacacgctcaccggaaatcaccgcctgctgtaaaacagactgctgggatgtcagcgtgataagcggttcattcagccgcccgaggtaggtgataaacgcatataacaccccgacgccgataacgccggtgccctcaaccccgaacaataacatcagaccacagaggatcgccgccgaaaacaggctcagcagcggacgcagcaaaatgccgtccagccgcagtgccgccattctgacctcataatgacggcggttggcggcaaacatcctttccccgaaacgcgcctgctggcggaactgctgaatcactgtcatgccgctgataatttcatggaaaccatcgttaatatcggccagataactgcgcacccggcgcacaatcggcgtgctcagccgctgatagatccacatcaccagcatcaccgccgggaacatcgcggttgccaccagcgccatccgccactccagggagtacatggcaatcagcatcaccacaatcagcgccacgctgcggaacagtgtcggcagcacgttgacaaacaggtctttgatcatctccgtatcattggtgacacgggagatcagctgcccgaccggctgggtgtcaaatgcactcagcggctggcgcagcgcggcatccatcacatcggcgcgcagtgtctggaccacgccgacagcggcctgattgaaataaatcagctgaaaataatgcagcagcgatgcggcaatctgtaaggcgacaaacccggccaccagcaataatgtcactgacaggacaatctgatttttcgccaccatattgtcgataaaatagctcaccagaaccggtgcggcgacttcagcaatggctgtcagccacagcatcacaatggcaacggccatcggacggcggtagttacggccatagccgagcagacgtttcagcgacggccacaggttttttgccgcttccgggcgggtctgttcactcatcgagcgcggcctctaactgctgataatgatacatctcacgataccatccgttctgattaatcagttcctgatgacgcccctgtgcactgataccgccctgttgcagcaccagaatattgtcggcttcagtcagcgctgagagccggtgcgcactgataatcaccgtacggccttccccccagcgccgcagattctgcaggatccggtattccgtctgcccgtccactgcggaaagtgcatcatcgaggatcaggatctccgcatccatcagcaaagcacgggcaatggagatccgctgtttctgcccgccggacagcatcacgccccgctcaccggcctgagtctcataaccgagcggcaatcgttcaatatcatcatgaacactggccagccgggccgcgtgttcaatttcttcctgtgttgccccgggccgccccagcgcaatattattggcgatagtatcggagaacagaaacggcgtctgattcaccaccgccagccgggcatgccagccggcgaaggtcagttccggcagcggtctgccctgaaaacagatacttcccgctgtcacatcataatgacgctggattaatgccagcagcgtggatttgccgcagccggtcgggccgcacaacccgagcagctggcccggtctgagggtaaaacggatatcatgcagaaccgcccggcggctttccggatagcagaattcattcacggcaacggacagctcgccgcgtcccggttgcggggattctgtaccatccgccagtaccggcggggtttcaagaagagattggatccggctgtaggccgcgctgccgcgctccacaatgttaaacatccaggctaatgccagcatcggccagatcatcagcccgagatacataataaagctggtcagcccgccgagcgtcagtgtgccctgcatcaccatccagctgccgccggcaaccgcgagcaggtttgacatcccgatagccattataatggtcgggtcgaaacgggcatctatctgtgccacatgcatatttttgcgtccggcttccgccgcaacggattcaaaccgggaagactggtgatcttccaggccaaaagctttaatcatccggatactgctgaggctttcctgcgcgtggttattcagggaggaaaatgcaccctgcgctgttttaaagcgctgatgcagctgctgcccgtaacgtttgatagccagagccatcagcggcatcggcagcagggaaagcagtgtcagctgccagctgatctcaatactcatcgtcagcaggaccaccagtcccatgacaaaagaatccaccagcgtcagcactccctctccggcggcaaacaccactttgtccacatcattggtactgcgggcgatcaggtcaccggtccggtaacggtgataaaaggccggagactggcggctgaactgctgataaaaatcctgacgcagacgcaccgccagcttgtaggaggcaccgaataaccagacccgccagatatagcgcagaatataaatcaccagtgcgataagcagcatcacgccgacccagacccacagcgtggtggtggtcatcgtctctttggtcacgccgtcaacaatgatgccgacaaagcgcggcggcaggatctgtaacaccgcgataatgatcagaaaagtgaccgcaccggtatagcgccgccattcactgaggaaataccattttaattgggcaaataatctcacaggatcccgtataacatctcaggttaataatcagtccgctttgcatttctccggaatcggcaatgcggtggtgtactttatgcgctccatcgcaaaattggaagtcacatcaattaaaccgggcacaccgttaaccagttttttgtaaaaatgatcgaagcatttcatgtccaccacctcgacctgcagcatgtagtcaaattccccggccatccggtaaaactccaccacatcaggcatctgctgaacaaattccacaaactgagtataccactcactgctgtggtgctgtgtcttgatcatgacgatcaccgtcagtcccagcccgagcttctccgggtccagcagcgccacacgtttgcggatatacccttcatcttccagccgtttcagccgtttccagcagggagtggatgtcaggttcaccgcttcggacagggtgttcagtgataatgcagcatcttcctgcaaaagttgtaacaatttacggtctgttttatctaacatatcaccaccagagagaataaatttctccatatcatgcatgatacagaaaatagaaaaagccttttctctcacagaattgctaagatgcatcaacagaccgtgaggagatactacatgacaacccaatggaccacatccgccattaatgccattcaggccgattatcagcgcagtgctgacacccacctgatcccgctggaattacccgtttacccgggggtttcattatatctcaaagatgaaagcactcacccgaccggcagcctgaaacaccgcctggcgcgttcgcttttcctgtacggcctgtgtaacggctggatccgcgaaggcacaccggtgattgaagcgtcctccggcagcaccgctgtctctgaagcgtacttcgcccgtctgctcggcctgccgtttatcgccgtgatgccgcgctgcaccgcacgccgcaaaattgaacagattgagttctacggcggacagtgccactttgtggacagcagtgcgcagatttatgcagaatccgagcacctggcccgcgaaaccggcggccactatatggatcagttcacctatgccgagcgtgccactgactggcgcggcaacaacaatattgccgaaagtatttaccgtcagatgtcacgggaagcccatccggtgccgcgttacattgtgatgagcgcaggtaccggcggtacttctgccacgctcggccggtttatccgctatcagggacatgacacaaaactggttgtcgtcgatcctgaaaactctgttttttatgactgctaccatcagaaatgctcgcatctgcgctgcgataccggcagtaagattgaaggcatcggccgtccgcgcgcggaaccgtcttttatcccgggcgtgattgatgatgtgatcaaagtcagtgaccagtgcagtatcgccaccctttactggctggaaaaactgctcggccgccgcaccggtgcctccaccggtaccaacgtctggggcgcactgcaactggcgaaacagatgcatgaacagcaacaaaccggctcaattgtgacactgatttgcgacagcggcgaacgctatccggacacctattacaacccgcagtgggtggcagacaacatcggcgatctgactgacgcacaggcaacactacccaaatggtgatgcagccgttaccataaaccttatctttttataatgaggtttaccgatgaaacgtgctgtggtcgtattcagtggcgggcaggactccacaacctgcctgattcaggcactacgcaactatgatgaagtgcattgtgtgacgtttgattacggacagcgccacagtcaggaaatagacgttgcccgtaaactcagcctgaaactgggtgcagcggcacataaggtgctggatgtctctctgctgaatgaactggcggtcagcagcctgacccgtgataacatcccggtgcccgggttcagtgaaagtgaacaaagtgatattccgaatacctttgtcccgggccgtaatatcctgtttctcaccctgacggcgatttatgcttatcaggtcaatgcagaagcgattatcaccggtgtctgtgaaaccgatttttccggttatccggattgccgggacgagtttgtcaaagcactgaacaaagccgtcaacgccggtcttgcccgtgatatccgctttgaaaccccgctgatgtggctggataaagcacaaacctgggcgctggctgattattacggacaactggataccgtccgcacagaaacactgacctgctataacggcattcagggggatggctgcggggaatgcgccgcctgccatctgcgccgcaacggactggacagctatcttgctgatcgcagtgctgttatggccgccatgaaaaaaattaccggcctgcattaagtgcctgttacgcccggcaacccgccgggcgctcttctgctctgacggtgatcagtcctctttcggtgccgtcagcaactcaaatttatcgcggatctccccttcaatcgggatcgctttaccggttttcatatttacaaagacaaaggtcacttccgcatccgccacaacctgcttatcttcctgacgggtaattatctgtttgagaacaccgcttttctgccccgcgtgctgtaaatagctgtctatcaccagccgctctcccacatacaccggcagccggtagttaatattgatattcaccaccaccacggcgatatccatctgtttgaaccagcggtaagcatcgtagctttccagccagtcccagcgggcggcctccagaaactccagataacgcgcattgttaacatgtccgaaggcatcaatatggtagccaatcactttaattgtggtgctcataatatctctccctttactctgtttccggtattcccttccccgtcagcccggggaagggaaatcagcctctgctgatattacaactctatcttatcgctgttcatcgtaaaaatacgctcaccaataccatatacatccttcagttgttccgcagaagtaaatggtccgttttccgtgcggtactccacaatccgctgtgcttttttcggcccgacaccactgagttcccgggccagttcttccgcagtcgcggtattaatgctgatgcggtttgtttcctgtgcaacagactgctgaacctgcgcactgtctgccggtggtgcagcctgagccagtgcggaagtactgaaaaaaccgccggttaacagtgctgatgttaataataatgcagatgtccattttgttttcatgctatttctccttttgtgtttagcacgaaacggagtgtcgcaaaaattttttctgccgggggattttcagaacagaaatgcgaaaggctgcgaacgcagcctttcagatgatgtaaaacgacattttatttttcggtacagatcgaaaaattttagttcatatttctcacatcaatatctgcgttagcacgcaggttcagcagtaatgattccagctcagtggacgccatttgctgacgcagcactgtacgcagttcagttttttcctgatccgttgccgtaccggctgtgactttatccagctgtaccagaacaatgttacccttgccgtcaatggtgcggctgtaggtcggtttaccgtccgcaggatgcggctgggtaaaggcagcattgataaccgggtctgacggattcaggcgctgaacagtctgctctgcaccgaatttcacaccggcttctgttaacgcggcgtcgcctttaccttctttcagtgccgtcagcagtttatccgcttccgcattcagcgcggcttccgctttgctgcgcttcaccagcgcgtcaatgtctgacttcactttttcaaaggattccactgcttccggacgatattcatcaacacggatcacaaaggcacggtcaccggaaacggtgatgatgtcagagttagcaccggaaggtcctttctcatcaaacagtttgttttccgttaatgcttttaacacttccggatagttaaccgcatccggcagactgttcagggcaaaccagtcagtctgtacagctttaacgccggttgcctgctcaacacccatcagggattcgttatcgttcgcagcagcttcactggctttctgctggaggtcaaagaaggctttgcttgccgcttcgcctttggccagacgggtggcttcttctttcacatccgccagcggtctgacggtttccggctcgtacacatccagacggaaaatcgcgtagccgttatccactttcagaacctctgaaatctgaccggcggttgtcagcccggcacctttaatttcagggatcagcgcagcatcttccatccagccgatcacgccgccgttacgggcagtcagtttatcggtggatttttctttagccagggttttgaaatccgccccgtttttcagttcattcagtaccgctttggcatcatcttccgtcgccagggtgatctgactgtactcgccttttgccggcacagtaaaacgcgggatatttttgtcgtagtagtcctgaatctgttcttcagtgactgatgtgttgtcctggatattcgcggcatccagctcaacaaaactgatttttaaggactgcggcgcaatgaagctgtttttattcttcgcgtaataagcctgcagctcttcatcggttgtggtctgttttgcctgagcagaagccagatccagtgtcgcggtacggatggtacgtgactggagtaaaacagctgcggcattggtcacttcggaatcaagcacaaatgagtcacgcacaaacggctgaaccagctgtgcctgaatcatctgcttgcgcagataagttgcgtagttgtcaccggtgataccgttacgggacaggaatgtctcatacgcctgctggctgaactgaccgttaacctgaaaatcaggctcctgacgaattgcgctgataatctggtcatcactgacggtgatacctaatttccgtgcatactgttccagcagaatggtgtcaatcatctggttcagcgcctgagaacggatttgtttaacgccctcttcggtgctgactaactgcgagaacaggtcacccaactgagcctgctggcggttacgctcttcctggaaggcgcgctctaactgctggaccgatatttcagtatcgttcactttggcagcatagttagaaccgctgacgaggtaaccacccacacctgtcagaataaatgacaggataatgatggcgaagacaattttaatcacagggttgttcgccgctgtgcgcaggttttccatcataagaaatccaaactccgctttggtaaaagaaaaatcaggtcaggggaaattatgccctaaaacaaaaaaaagcgcatcattctgatgcgcttcctgtttagctttatacggtttttgtgcccgggacagataaatatcccgttgcctgaggaaaaactcagccgtttactgcgtctttaagacctttacctgcacggaaagccgggactttcgcagcggcgattttgatctcttttccggtctgcgggttacggcctgtacgtgctgcacgctcacgaacagtgaaagtaccgaaaccaaccagagccacgtcatccccgcccttcagagaatcggttactgaaccaataattgcatctaacgcgcgaccagccgcagctttagaaatattagcgtctgcagcaattttatcgaccaattgtgacttattcactattatcatcccctttcagaattttcggcccggatttacgaagtatgttcctgacagccacagccgttatatcaagccttttcgctcttggcaagattgcagacttcgcatgtttcgtaagaatgttcgctaaattagcgggacaaaaaaaggctgacaagtcctaaagtacctgtcagccctttatttatctgaacttcttgacgcaggtcactatttcctacgcctttttacttaccacttccataccaaaagcaggattcactaaggcaagtgaaagaacttcatctattgttttaaccggatgaatatccagatccgcttttacgttatccggaatttcttccagatcacggcggttttcgtccggaatcagaacagtcttaatgccgccgcggtgtgctgccagcagtttttctttcagaccgccgattggcagcaccagaccacgcagggtaatttccccggtcatcgccacatccgcacgtaccgggttaccggtcagtgcggaaaccagtgcggtacacattgcggtaccggcactcgggccgtcttttggtgttgcaccttccggtacgtggacgtgaatgtcgcgtttttcatagaaatcattgttgatccctaatttatccgcccgggcacgcaccacggttaacgctgcctggatagattcctgcatcacttcacccagtgaaccggtgtaggagagtttccctttacccggaaccgctgcggtttcgatggtcagcaggtcaccgccgacttctgtccacgccagaccggtaacctggcccacacggttttcagtatcagcacggccgtaatccactttctgcacacccaggtaatctttcaggttgtcctgattaatctcgatgtgtttcagtgtcttatccatcagcagctgtttcaccgctttacggcacagtttggagatttcacgctccagtccgcgcacgcccgcttcacgggtgtaataacggataatgccgaggatcgcgctgtcatcaatatgcagctcggttttcttcagtgcgttgcgctcaatctgcttcggcagcaggtggcgcttggcaatgttgagtttctcatcttccgtataaccggacagacggatcacttccatacgatccagcagcggtgccggaatattcatggagttggatgtcgcgacaaacatgacgtcggacagatcgtaatccacttccaggtagtgatcgttaaacgcgatattctgttccggatccagcacctcaagcagtgcggaagccggatcgccgcgcatatccgatgacattttatcgatttcatccagcaggaacagcgggtttttcacgccaacttttgccattttctggataagtttacccggcatagaaccaatgtaggtacggcggtgaccgcggatttccgcttcatcacgcacgccgcccagcgccatacggacatatttacggccggttgcacgggcaatggactgccccagagaggttttacccacccccggcggtccaacgaggcacaggataggccccttgattttgctgatacggctttgtaccgccagatattcaaggatgcgctctttcacccgctccaggccgtaatggtcactgtcgaggatttcctgcgctttaagcagatcttttttcactttactgcgcttgacccacggaacctgaatcatccagtcaatatagctgcggacaaccgtcgcttccgctgacatcggcgacatcattttcagtttctgtaattccgcttcggctttctcttttgcctctttcggcatctgcgcttcttcgattttgcgtttcagcgcttctgcttcatccggcgcgtcgtccatctcacccagttctttctggatagctttcatctgctcattgagatagtactcgcgctggcttttttccatctgctttttgacgcggttacggatgcgtttctcaacctgtaacagatcgatttccgattccatcatcgccatcagatattcgagacgctcaaccatatctgacatttccagaacagactgtttgtcctgtaatttcagtgtcatatgggaagcgatagtgtcagccagtttggcgacatcgtcgatactgtgcagagatgtcaggacttccggcgggatctttttattcagcttgatatagccttcaaactggttgatcgccgtgcgcagcaatacttcctgctcgcgctcgtccacgacaggggattccatcagctctgcctgggcagagaagaaatctccgttgtcacttaatgttttgatatgcgcacgttgcaggccttcgaccagcactttgacggtgccgtccggcagtttcagcatctgtaatacagacgcgactgtcccgacggaaaataaatcattgacgcccggctcatccgttgacgcttctttttgtgctaccagcagcacttttttatccatatccatcgctgtttccagacagtggatagatttttcgcgcccgacaaataaaggaataaccatgtgggggtagaccaccacatcgcgcaaaggcagtaccgggatttcaatgcgttcagcacgctcaggattcatagagcactctcttcgtttagcttacgccttgttgggaacgtcgtgaaacgcgttatcacgggttccactccatagaataatcaatatatggggatgcatttctcacattcaacactttatttagtaagaaaagcaaaatgagggaaaattccctcatttagttaatattgataacaactgcgctaactttccgttactcgccggaaacctgagcttccggtttgcggtaaatcagcatcggttcggtctggttggttatcacgttttcatcgataaccactttttcgacattttccatcgacggtaaatcatacatcgtgttgagcaacgcagcctcaacgatggaacgcagaccacgggcaccggttttacggttcatggcttttttcgcaatggcaatcagtgcttcacggcggaactcaagttcaacatcttcaatgctgaacagcgcctgatactgttttgtcagcgcgtttttcggttcctgaaggatctgaatcagcgcatcctcactcagttcaccgagcgttgccacgacaggcagacggccgataaattccgggatcagaccaaatttgatcagatcttccggttcaacctgagccagtaattcgccttctgtcgctttgtctttctcgccgcgcacttccgcaccgaaaccgataccggaacgggtattcagacgctgaccgaccactttatccagaccggcaaacgccccgccgcagataaacagaattttcgaggtatcaacctgtaaaaactcctgctgcggatgtttgcgcccgccctgcggcggaacagcagcgatagtcccttcaaccagtttcagcagagcctgctgaacgccttcaccggaaacatcacgggtaatcgacgggttatctgatttacgggagattttatcgatttcatcaatatagacgataccgcgctgtgctttctccacatcatagtcgcatttctgtaaaagcttctgaatgatgttttcgacatcctcccccacataaccggcttcggtcagtgtggtggcatccgccatggtgaacggcacatccaggtagcgggccagggtttcagccagcagggttttaccgctgccggtcgggccgatcagcagaatgttacttttacccagttccacaccgtcagcggttttatcgccgttgcgcagacgtttgtagtggttgtataccgcgactgccagcacttttttagccagttcctgaccaatgacatagtcatcgaggtgctgacgaatttcatgaggcgtcggcagttcactgcgctcactgccacgggccgggatcagatctttaatttcttcacggataatatcgttgcataaatcaacgcattcatcacagatatacactgacgggccggcaatcagtttcttaacctcatgctgactttttccgcagaaagagcagtacagcagctttcctgaaccgtctttgcgtttgtctgtcatcagtaaacctcacttaatcagtacagctcaccgcctgtgagccgcaaaaaatgtcacagcaccgcagtaccctgccgcccggcaggatacgggcagtgcctgtgttacttaccggtgtgtgtaaatatggtcaaccagaccgtattcctgcgcttctttcgcggacaggaagcggtcacgctcggtatcacgctgaatttcctcaacggatttaccggtatggtgagctaataaatcattcatgcgcgctttcactttcagaatttcctgagcatgaatttcaatatcagtggcttgtccctgatagccgcccagcggctggtgaatcatcacccgggagttcggcagacagtaacgtttgcccggcgcacctgccgccagtaagaaagaacccattgagcaggcctggcccacacagatggtgctgacctgcggtttgatgaactgcatggtgtcataaatggacatccctgcggtgatcacgccgcccggcgagttgatataaagactgatgtctttttccgggttctcagcttccaggaagagtaactgtgccacgatcaggtttgccatatgatcttcaacctggccggttaaaaagataatacggtcttttaataaacgggaatagatatcgtaggagcgttcaccgcgtgaagtctgctcgataaccatcggcaccagcgccatgttgggtgcgaaagtatcctgattgtcgtgatatgacatgtccatctcctgattgaattttattggtgcctggcggataccggttattttacttgagatccggtgcgatgaccatgcgctatacgcgatccggtcacataagcagcatatactgtccggcagataccctgtatggcaaatatgggggataaccaccgcagttttcaaggaatattgtcagaaatgacgaaaaaaccgcagacaatacacattgcctgcggttttatatcagataaacagccttcggccgttcacaaagagagaggattaacctgctgcctgaacctggttcatcagatcagtgaagccggtttctttatctgtcacttttgctttcgccagaacagtttcaacagcctgctcttccagtgccagattacggataccatccatcatctgtttgtttttgttgtagtattccacaacttcagccggatcttcgtacgctgatgccatttcgtcgatcagcgcattaacgcgatcgtcttcggctttcagttcgttagaagaaatcacttcgcctaacagcagaccaaccattacacggcgcttagcctgaccttcaaacagttcgcgaggcagttccatcgcctgtttttcagagccaccgaaacgctgtgccgcctgacggcgcagttcttcgatttcgctgtcaacagctgctttcggtacatcgatttcgtttgctttcagcagaccgtcgataacctgggttttgatacggttgcgtactgcgtttttcagttcgcgttccatatttttgcggatttccgctttcagaccttccagggaaccgtcgccgataccgaaacgtttgatgaactcttcagtcatttccggcagttcgcgctcttccacttttttcaggctgatagcgaatttcgctgctttccctttcaggttttcagcgtggtaatcttccgggaatgtcacttcgatgtcgaattcttcaccggctttgtgacccacgataccgtcttcgaagcccgggatcatacgattctggcccatgaccaggacgaaatcagaagatttgccgccttcgaactcttcgccgtcaacagaaccggtgaagtcgatagtgatgcgatcgtcagctttagctgcgccttcagtcactttccactcagcctgctgtttgcgcagagtctcaaccatgccgtcgatgtcttcgtctttaacttcaacaaccggtttttcaacttcgattgtttccagacctttcagctcaatttcagggaagacttcgaactcaacagtgtaagtgaaatcctgaccttctttatacggctcatcaactttgtagtcaggcgcgccgacagggttgattttgttttcgatgatagcgctgacaaagttacgtgacatcaggtcgctcagtgcatcctgaaccgccacatcgccgtaacgctgtttgatgatgttgtgcggcactttacctttacggaaaccgtcgatacgtgctttcttggcgatttcagctaattgtttagttacttctttgtcaatatcggctgcaggaacggtgattaatacacgacgcccaaggccttcagtcgtttcaacagaaacttgcatcttattacctcaaaaaagtctattgctcggtcaactccatatctcacaccggcccgatgcctgtgtgaaacgataatgaaccggggcggtcgcatttaaaaaccgagttcccttatattcagaagcgtcccgaaaccatacggaatttcagacgcgacattatagcgatgctgacaggccgcgtcgagaagtgcagacaaaagagtctgaatttcaccctttttctgttaaattttgtgctgtgcgctgctttttcactcaaacagcggcttactttccgccaccatgacaacgcggggacggattcaccccgccctgactgtgattccactcatccggggtataagtatgcagcgccagagcgtgaaccccgccagccagctcatcagccagcagcgtgtacatatgacggtgacgtgccaccgggcgcatgcccgcaaaggtctcactgaccaccaccaccttaaaatgggtttccgatcccgccggaacattgtgctggctgctctcattcaccacactgatataatgaggcgcaagcgcgtgattcagtttttcttcaatacgctgctgcattacagcaggaaatgatgccgacataactatccttccggtcaatactggctttcagagaaagctcagtgtagtgagttttttatcaaaatccataccattcgcggataaagccgattatcatcatgcgttaagccgaacactcacaccccggcgtttatccggtgctgtgactgacttcaacaacttgtaacggattcatattatgttgaaaaaatacctcctcccgctgttcgcaatactcttactggccgggtgtcaggcgccgtccaacaccctgtccattgaaccggtgatgaaattaccgtctgcggatccgacgctcggtgccgccactatctcgattaccggtgtggataaacgcccgtcacagactctggccgaattcagccgtaacggccagctggcacagctgcgcccgtcccgtgacctgcgtttcctgatgcaggaaaccctggaaaaacagatgacagcgcgcggttttatgattggctcaccggcaaatgccaatgtgcagatttccatcaatacctttaaggcggatgtacaggaaggcagcctgcgccataatatcaccgtcaatattgatattaccattctcgccaccgcgcagaataacagcacaaagagccggactttccgcaccagctataatgtgcagggcccgttaagcgccagcaatgaaaaaatcactgacgcctttaaccgcgcactcagcgatatcgtcgcggacatggctcaggatacccaaatcagccagttcattaagcagaacacccgctactaatctgccgtgccgcctgctgccggataacgccgggcggcccgctgttttcagtcactgtcaatgcgccgcagtctgcggcgtgtgaggataatcatgctccggagtatttgggcgacttacagcgagcgtaatgcccgtattcttttactgctcggtttcgcatccggattaccgctggcactgaccagcggcacactccaggcctggatcaccgtcgaaaacgtggatatcaggaccatcgggtttttcacccttgtcagccaggcctatgtgtttaaattcctgtgggcaccgtttatggatcgctaccagctgccgttcctcggacgccgccgcggctggatgatcgccacccagctcctgctggttgtcagtatcgccggtatggggatgctgaaaccgacggaacacctctggtggctggctgctgccgccgcgattgtcgctttctgctccgcctcacaggacatcatttttgatgcctataaaacggatttgctgtccgcgaaagatcgcggtaccggggctgcgatatcaaccttaggttaccggctggccatgctgctctccggcgggctggcgctgtttatcgcccaccgttataccggctggcagaatatgtacctgctgatggcggcgatgatgctgattggtgtgttcgccacactgcgcgcaaaagagccggaaaccgatgccccgccgccgcgcacactgcgtgaggctgtccgggagccgctggcggagtttttctcccgtaacaacacctggctgctgttactgctgatcgtcctttataagatgggggacgccttcgccctgacactgagcacaccgtttctgatccgcggagccgggttcggtccggacgaagtgggacttatcaataaaaccctggggctggccgccacgattgtcggggccctgtacggcggttatctgatgcagcgctggagcctgtttaaatccctgatgttcttcgggatcctgcagggattttccaacctcggctactgggtgttatctgtcacaccacaaaatatctatatgatgggcggcgtggtatttatcgagaatatctgcggcgggatgggcacagccgcctttgtcgccctgctgatgacactctgtaaccggtccttctccgccacacagtttgccctgctgtcagcactgtctgctgtcggccgcgtctataccggcccgtttgccggctggatggtggaggcctacggctggagctggttctatctgttcaccgtgtttgccgcaattccgggattgctgctgctgatgttgtgccgcaaaacgctgctatacacccagaaaacggagcagtttctgccgaggcagcacttccgcaacggctaccggacggcgatgtcactgctcggtatcaccgcagtactgttcgcagccagcctgatcctgctgctgaccggggtatttgaactgactccgggctttattccggacacgctgaaaggcgacctgtttatttacggcctgaatatcggtattgccgggttgttcctcggcgggctgctcgattattgtgcactccgccgcgataaactggcctgacaggctgttacgaatatcagaaaaaattcaatcaaaagtttataaagccggtttttaccggctttttttatgtttaattttagatgtaagtcacaatttttgtaatttatttcttaaaattacattcaaaaccacaaatacgtcacatcacccattttcctttttgtgccttcaccctatattcgcgctgttacttctgacttctgtactctttaacgaccaaataaacagctaataaattatgaaaaaaacgactattgcagccctgatcgctgcaaccgccgcgttttctgcgcaggctgaatatcagtggggatttgctaacgtcagcatgaactatctggactggactccgcataccactcacaagagcggcaacagcacgcataaggatgactttgcgtatctggagcttgagggcggtgccggtttcagctggggtgagctctatggtttcttcgacctcgagaacgcgtttaacagtaaaaacgattccgatgccggtgataaccagcgttacaccttcaaaaccacggcgcgtatctacctcggtgataccggtttcaacgcctacggtcatgtttacggtacctactctctgccgggtaacggcggtaacttccatgaagtgaacaccctgtacggtatcggttataacactgaattcaacgggttatggtttaaaccgtttgctgccctgcactatgttgatcaaacgttttacagcggtaacaacggttatgttctcggctgggttgccggttatgactttaacctgtggaatgaaaaattcagcgtcaccaactggaacgaaatcgagcttaaccgcaacgaccgttacggcaacggcgggcgtgacggcgtcaacggcgcgctggccttatggtggacaccggttccgtcagtgacaaccggcattcagtatcgctatgcggataacaaactgggtgaggatttttaccagcaggctgtggtttacagcataaaatataacttctagatcacattttttcgctgcggggggcaaaaacccccgtatttttaccaggaaactgtttctgaacaaaaaaatttcaccattacgtcacataaagtgtaataatcagtgtttcatcctttcggtatttccttccctaatctaagcttaaatataaatttgtctcctgattgttaaaattgtgatttttatttcacgatttcataaaaattggctcacttgtgatccttttaacataaagaggcaacaaaccaaccaatcttattacatatatttacactgatcttaccttgccgtaatatgtgcggactgatgaaacgacaagagtacttgagtacctttgtttttggggtcgttggatgagacttatgaactacaaaaagagtattggggtaatctcgctgctcgcatctgcacttttgctgggcggatgcgatatggcactgatgaacccgaaaggcactatcggtgctgagcaaaaaacactgattttaaccgccattggtctgatgctcattgtggttattccggtcattatcatggcaatcgtttttgccctgcgttaccgggaaaccagaaaagcaacttaccgtcctgactgggcgcattccaataaaatcgagctggtcgtctggactgttccgatcattatcattctgatcctgggtaccattacatggaaaaccacccatgagctggatccgtacaagccgctggtcagtgaccaggagcctgttaccatccaggttatctcaatggactggaaatggttatttatctatccggatcaaggcattgccactgtcaatgagatcgcattccctgtcggtgttcctgtcaatttcaaaatcacctctgattctgtgatgaactcgtttttcatcccgcagttaggcggccagatttatgcgatggcaggtatgcagaccaaactgcatctgattgcggaagagccgggcgtgtacaaaggcatttctgccagctacagcggccacggtttctctgacatgaaatttaccgccactgccaccccgacacgcgaagccttcgatgagtgggttgcgaaggtgaaagcctcaccggacactctgaccaccaccgaagcgtttgacgcactggcaaaaccgagtgtgaacaacccggttgtctatttctccgcggtcaaaccaaatctgtttgtggacaccattaacaaatttggtcacagcggccacggtgccgggaagacacaggaaggcgaaagccattcaatgatgaacatgagcgcagatgaacacagcagccatatgcctgcagctcatgccgggaatgaggggtaaagcatgttcggaaaattaacactggatgccatccctctgcatgaacctatcgttgttattacggtactgggtatcattctgggtggtgctgcacttgtcggtcttatcacctacttccgcaaatggacgtggttatggactgaatggttaaccaccgttgaccataaaaaaatcggtattatgtacatcatcgtttcgatggtgatgcttatccgtggttttgctgacgccattatgatgcgcgcccagcaggccctttcgtctgccggtgaagccggattcctgccgcctgaacactacgaccagatctttaccgcccacggcgttattatgatcttcttcgtcgcgacaccgtttgttgtcggcctgatgaacctggttgtaccgttacagatcggcgcccgtgacgttgccttcccgttcctgaactccctgagcttctggttcttcgtggtcggcgtgatgctggtgaatatctctctgggtatcggggaatttgcacagaccggctggttggcctatccgccgctgtcgggactggaatataaccctggtgtcggggtcgattactggctgtggagtctccagatatccggtatcggtacattgctgaccggggtgaacttcttcgccaccgtactgcgtatgcgtgcaccgggtatgtcgatgatgaaaatgccggtctttacctgggcggcattctgtaccaacatcctgattatcgccgcattcccgattctgactgtcaccttaaccggcctgacattagaccgctacctgggcacccatttcttcaccaatgatatgggcggcaacatgatgatgtacatcaacctggtgtgggcatggggccacccggaagtgtatatcctggttctgccggtcttcggggtcttctctgaagtcactgcgacattctcgaaaaaacgcctgttcggctatacctcactggtatgggcaactatcgcgattactgttctgtcctttatcgtctggctgcaccacttctttaccatgggctccggcgcgaacgtcaacgccttcttcggtatcgccacgatgataatctccattccgaccggggtgaagatattcaactggctgtttaccatgtatcagggtcgtatcgagttcaaaaccccgatgctctggacagtcggctttattatcaccttctccgtcggtggtatgaccggggttctgctggccgtgccgggggcaaactttgtcctgcataacagcctgttcctgattgcacacttccataacgtcatcatcggcggtgtggtcttcggttgcttcgccggtaccgcttactggttcccgaaagccttcggtttcaccctgaacgaaaaatggggtgtccgcgcattctggtgctggttcatcggtttctttgttgcctttatgccggtttacgtgctgggcttcatgggaatgacccgccgtatcagccagaacattgacccgaccttccacaccatgctgttaatcgcagcggtcggcgtggcgattatcggtgtcggtattctgtgccaggttattcagttctacgtcagtatccgtgaccgcgaccagaaccgcgaccttaccggggatccgtggggcggccgcacgctggagtgggcaacctcttcaccacctccgttctataactttgctgaagtaccggatgttcagtcccgtgatgaatggtgggagatgaaagaaaaaggcaccgcgcataaacgtcctgcaaaatatgaagaaattcatatgccgaaaaatacggcagcaggtgtgattatcgccggtttcagcctgatctttggtttcgccatgatctggcatatctggtggctcgcgattgtcggtttcgccggcatgatcgtcacctggattgcaaaaagcttcgacgaagatgtggattactatgttcctgtggctgaagtcgaaaaaatcgaaaacgcccactacgaacaactgagcaaggcaggtgtggataatgtcaactaataccctgactcaacataataacgcccatgataatcatgggcatcacgatgcaggcgcgaccaaggtcttcggattctgggtctacctgatgagtgacctgattctgtttgcgagtctgttcgccatttatgtggtgctgaaagacggcaccgccggcgggccgaccggcaaagagatctttaacttacagtttgtactggtggaaaccttcctgctgttattcagcagtatcacctacggctttgccatgctggcaatgaaccgcaatcaggtgggtcaggttaatctgtggttatttgtgactttcctgttcggcctcggcttcgtggcgatggaaatctatgaattccatgaattaatcagcgaaggttacggccctgaccgcagcggcttcctgtccggtttcttcaccctggtggcaacacacggtcttcacgtcacagccggtcttatctggatcatcatcatgatcatccagaccagccgccgcggcctgaccgaagtgaataaaacccgcctgaactgcttaagcctgttctggcacttcctggacgtggtctggatttgtgtgttcaccgttgtttatctgttgggggcactgtaatgagtcattcaaatacagccggtaccggggcaagccacggtagtgtgaaaacctatctgatcggctttatattgtcggtcattctgacagtcatcccgttttatatggtgattgagggaaccgcctcgacatctgttctgctggcgactgttgtgattactgctgttgttcagattcttgttcacctggtgtgcttcctgcacatgaataccgcgtctgaagagcgctggaacctgattgcgttcctgttcacgctcctcattatcggtatcgtggtcgtgggttcactgtggattatgtacaacctgaacatcaatatgatggttgattaagagttgccgatatgatgaagcaatacctgcaagtgaccaaaccgggaattattttcggaaatttaatttctgtggtcgggggattcctgctcgcctccaaaggtgacattgattaccctctgttcattgcgacattgctcggtgtctcgctggtcgtggcctccggttgtgtttttaacaattacattgaccgcgacatcgactccgtcatggaacgcacgaaaaaccgccctctggtaagagggcttattgacccgaaaatcagtctggtttatgcctctgtgctgggtattgccggcatggcgctgctgttagtggcagccaatgtggtggcaatgctgattgctgttgtcggttttgtggtttatgtcggggtttacagcctgtacatgaaacgcaaatcggtctacggcacactggtcggcagcctgtccggtgccgcaccaccggttatcggctactgcgcagtgacaggccagtttgataccggcgcactgatcctgctgttaatcttcagtttatggcagatgccgcactcctacgcgattgccatcttccgtttcaaagattaccaggcggccaatatccctgtactgccggtgattaaaggtatttctgtggcgaaaaaccacattatcctgtacatcatcgcctttatgtttgccacactgatgctcgccatcagcgggtatgcgggatataaatacctgattgtcgccgcggcagtcagtgtctggtggctgggtatggcgttatcgggctataagacaaccaatgatcgtgtctgggcgcgtaagttgttcgtgttctccattgtcgctatcacgtcactcagtgtgatgatgtctgttgacccgagcgtctccggtgatgttctgctggcctacagtcgttaatacacactttctgtaataacaaaatggcagggctcccctgccattttgtgtttagtaaaaaccacaaatctcattagaatgtggtgtctgtctttttgaggttatcccatgaacgataataaaatgaccccgcttgagcgtcgtacgacctgggggttaggctcggtattttctctgcgcatgctcggcatgttcatggtattgcctgttatcaccacgttcggactcgattttaaagacgccaccagcaccctgataggctttgccattggtgtctacggcctgacccaggccatcttccagatccccttcggcctgctttctgacaaaatcggccgcaagccgctgattgtcggcgggctgattatttttatggcgggtagtattgttgccgcactcagccactctatctacggcgtgattgccggacgggcactccagggcgcaggggcgatctccgccgccgtcatggcgttactgtccgataccacccgtgaacagaaccgcactaaagcgatggcgtttatcggtatcagtatcggggtaacctttgcggtcgctctggtactcggcccggtactggcggatatcgtcggtctgtccggcctgttctggggcattgccctgctcgcctttttcgggatcctcatcaccctgtatgtggtgccggacaacaaagagcaccgccagaaccgggaaaccgccgtggtaaaaggtgcgattaaacaggtgctgatggataaacagctcgcccggctgaatttcgggatcctcgccctgcacaccctgctgatggccacctttgtcgcgcttcctctggtaatgagtgatgctgggctggcgcgggaatcccactggaaggcgtatctgtacacgatgctgattgcctttgtgtctgtgctgccgtttattatttatgcggaaaaataccgcaaaatgaagcaggtttttgtcagttgcgtggttatgatggcgctggcagaaatcgtgtttctgctggcaggcaaaaatctgtggctgctttacggtggattacagattttctttatcgccttcaatgtcatggaggcaattctgccgtcactgatcagcaaagaagcaccggcgggctacaaagggacggcgatggggatctactccaccagccagtttatcggtgtggcgctgggcggcagcctcggcggcctgctctacggcatcaatggtgcggtaacggttttcggcggtggtctcatactgacacttatctggctggctgtcagtctgacactgcgtcagccgccgtatgtcagcagcctgcgtctggagttaccggaaaatgacgtgaataatccggatattgccgtgaaattacgcggacagccgggtgtgcgtgatgtggtgattattgcgcaggaacgggcggtgtatgtgaaaacggataccagactgtcaaaccgcaaacaactcgaagccgttttacagggctgacaggaaccggcaaccatgctgatgcaggctgccggataacactcagtcgcggaagtttttgaactggaaaggctgccccagtttcccttcgcgtaccagtgccataacagactgtaaatcatcacgggatttgccggtcacacggacttcttctccctggatttgcgcctgcactttgagtttgctgtctttgatcagcttgacgatttttttcgccagtgcagcatcgatcccctgtaacagggttgcctcaacactgtacagcttaccgctgtgaacaatctcatccggtaccgtcagagacgcaccgtcgattccgcgtttcgccagtttttcccgcataatatcaaccagctgattgacctggaaatcagattcactggtcattttaacactgttatttttctcattgagctcaatcgtggcggtaatgttgcggaaatcccagcgactggtcacttcacgctgtgcgttttccacggcattgcgcacttcatgtaattcaacttcagaaacaatatcaaatgatggcatcggaagacctccctatattcaactgaccggcataataccgggtttatcaaaccaacaaaagcactatatttcccgctatatttactaaggtgcaaacggacaaaaagtggtactattcagtgatattgctcacatctttttcgctgtccggagtccttatgaaaataacagtactgggttgcggcgcaatcgggaaactctggctcgctgcactgtcaggcaatcatgaggtgcagggatggatgcgtattccccagccctacctgaatgtgaatattgactctctgaacggagagccgttttacgggcaatttaccacaaacgatccggaattcctcgcacaaaccgaattattactggtttgcctgaaagcctggcaaacctccgaagccgtaaatcagctgctgccgcagataccggaatcctgcccggtgttactgctgcacaatggtatgggtgtggcgcgtgagttgtcccgctgcccgaatcctctgctgaccggcatcacctcccacggcgcatatgaagaaaacggtctgctgcatcacagccgccggggactgacccacattggtcctgtgaatgaacgcgcccgtcattacggccatctggcggatattctgcatgatgcactgccggacgtagcctggcatgatgaaatcgatgcggccagctggcaaaaactcgccgtaaactgtgtcatttccccgctcaccgttatctatgactgcaaaaacggcggactaatggcgcacctgccgcaaatccgtgtgctgtgtgatgaagctgctgaagtgatgctgcgtgaagggatccacactgacggtgatgatatctatgaatacattcttcatgtgattgaaaaaaccgccgatcacagctcatccatgcgccgggatattctttacggccgttataccgaaattgattacatcaccggctatctgctgcaacgcgcccgttatcacgggatcctgctgccggagcatattcacgtttacagcctcgtcaaacaaaaagaggaacaaaatgcccccttcagttctcatttgtctcgctgacggctgcgaagaaaccgaaaccgtcaccaccgctgatctgctggtccgtgccggtgtgacggtcacactcgccagtgccaatgatgacggcagctgtctggtcaccggttcacgcgggatccgcattatggctgatgtaccgctggtgcgggtagcggacaccccgtttgatgccattgtgctgccgggtggcctgaaaggtgcggagaatctgcgtgacagcccgctggtgattgaaaaaatccgccgtatgcattgtgacgggcacattgttgccgctatctgcgcagcgccgtctgtcattctggtgacccacaacctgtttccgctcggcaatatgaccggctatccggcactggaagataaaataccggcaaaacagtgggtcaatcagcgggtctattttgatgagcgcgttaacctgcttaccagccagggcccggccaccgccatcgattttgccctgcgtctgacagagcgtctttgcggacaggaaaccgcagcaaaagtggcggcagaattagtactgccgccggggatatgggattatcaggataccccttaccgcacgctggctgatcagggctgaataacaagcggagccggtgttgcgggctcctgtattacctcaggagcctgttccggttctgcacccttttcaggctccggaaccaccatcatccagactttgggtttcagtgaataatgtcccgctttcagcgctgcccaggccgcctgcttctcttcttcagaggcatactgaatatcctggtaatcacgctcttcccagacctgtttatccggctgaccgtctgtgacttccgtggcttgctgccagatctgacaatagaacgataaatcagaataaccgctgacacagaccagcgcatcatcctgtccgtcgccatccgcatccgccataaagccgagacactccccgcctgcggaggattcagtacagaaccaggcgcgtgtcacatcatattttccttcccaccaggattccggcagcgccgggctgcccgctactgtgagcattacctcccgcagtgtccggcggttatcctgatcataagaggagtatgtcagtgctttactgtattccggattttcattcagcatcgcgagtaccgcctctccccgtttacccaggtcttccagggtatagcggatatcagaggtgactttgattctgcccttttcaatacccgccagaatactgtttgccgtgatctgtttaaaatccgccagcggactgctgatcaccaggataatcgccatcagtatcagtaatccggctttgttgaccgccccgagcaatactgcccatccgctgcgtttccataacagtgccgcgctgtacgccagcacaaccatcgccagaaacagtgcgatacaaaatccgtataaccgatcaatactccagctgtactgattaacacgcaccagaatgccgtaaaccgataacagcgaaaaaacgttcagcaacagcacaccagccaataccagtccgttgagccatgaacggaagcgtggcacacattcattaccgtaaaccagattcagcagcaggatattcagcgaaacaaaccagatcatggtgaatgaacccagcccgctgacacggacgccggtcaccaaggataacagcaatccgcctgccgcaatcacaccgatcacggtcagcagcggtagcagtacccgcgccacataaccggcgatttttccggtgctgaaggtgaataccgtgcggataaacacaaggctgatattgaatccgagacaaaaactcatccagaaatacagagaatcattcagccagtcactgagaaattccagattcacaatccggaacaggtaaaccgccagaaacagcattcccatcaccagcaggccgataagccccgccagcgcacccagcacggtatttctgacatactgctctgtcaacagcgcataatccgggttccacgagccggacaactgccgcaactgaaaccacggcagaatcagccagaacagcagtaccatcagaggaatgagtgaagagagctcacgggtgtggcccgccgttgcctcactcagataccagaaattcatccagacacagagaacggcagtcagcagcagccctgcccagagtgccgccgaagaaaaacggttaatcagataactgaataccgacggcacaaacagcgccagcagcatcggcagccagaccagcgaccccggcacctgccacgaactgcggataaggtaatcggatgttgcattcagtgtaagcccctgaaggagcgccaccacaataacaataacatagacaaaacggcttgccggtgcctgaagcgcactgtttttcattctgaaaccccgtcagtaatataggttgctgccggacagcatagtgccggaaccggcacaacggtatcccttaaactctgaaaaaagacaataaaaaaccccgcctccacagaggcggggttcagaaataaatgacagctgcgactcagggacgatacaccttcacattggtatagccctgctctgccagatacatcgcctgcagacggctcatcaccccgcgatcgcagtagagcagataagtggtctccgccggtaaatcaccgaactgagtgctgagcttgtagaacggcagtgtgcgcacttccgttccctcaattttcagcggatgcgcttcctgttcatccggcgagcggatatccagcaccacatccgtggcagacagttctgataccatctccacttcagtaacctgctgctcactctgctgcgcgatcacacggatatccatgttctgcgcgttgagcaccacatcatccagaatcgcaaaatcgaatttctcttcttcggcttcgattttctctttcaccgctttcacagtcgggtttttcgagatcacgccgcagaattccggcatggtacgggcaaaatcttcagtaccgatctgacgggcaagattgataatggtttctttgtcgtgtgagatcagcggacgcagcaccagggtgtctgtcgcgttgtcgatcatgcgcaggttagtcagcgtctggctggaaacctgtcccagcgcctcgccggtcacaatcgcctgcacgccatagcgttccgcgacacgggatgccgcacggaccatcatccgcttgagcaccacgcccatctggccgtcatccactttttccagaatttccgccactaccggctcaaaattcaccgccacaaagcggactttgtgcgagctgccgaagcggttccacaggtaatgcgccacctgtttcacaccgatttcatgtgccgcaccgcctaaattaaagaagcagtagtgaacacggcagccgcggcgcatcagcatatagctggagacaccggaatcgaacccgccggagagcagagacagcacatcttcctgagtcccgatcgggaaaccaccgatcccttccagacggcgtaccacgaggatcagtttgtcatcttccacttccagattcaccgtcacatccggatgcgtcagttttaccttcgcggacggaatatgctggttcaggccgccgccgacatagcgctccagctcaatggaactgaacgggtgcttaccacggcgcttggcgcggacacaaaaggttttgttttccagtgatgcggcatacatttcgaaggtctgctcataaatattatgcagatcggtaaatgcgcgctcttccacctgtaaaatatggtggataccgggaatacgggtcaggcggtcagccacaccttcgccaagctcttctttcttcacgcggacttcaagatagtcccagtgacggacaaccgccacgtcttcggccagatctttaagcacattacggatgttactggtcagaattttaataaagcgcaggcggacactctggcttttgatggtaatttcaggaaataatttaatgataaacttcataacggtttactggctatcggcttgatttgcaaaggacggagcagccggtgtcaggcagcggcaatccccgttgatgaaattgaaaggcggcagtatatcaccatatctcgatctgccccgtaaaaatcgtaaatgaaaggcacaattttcactgaaaagtgtaaactaggaattatttgcgacataaatgcaacatcactgaaaaacagaccatgaccaaaaaaacatccgcaacgaaaaccgatgcactgagctttgaagcatcactcgatgcccttgaagggatcgtcacccgtctggaagcgggtaacctgccgctggaagaagccctggccgagtttgaacgcggtatcgcactgacccgcaccagccagaaaaccctgatggcagccgaacagcgggttcagatcctgctgaatgatgatgaaaacgccccgctgagcgattttacacctgaaaacgactgaccgcccggatccggcggttcctgtgtgaacgagaatgaccatgccagaacaaactcccgaaacattccgcaaccaactgacacaggccagagagcgtgttgatcacgttcttgatgagatcctgaccacactgccgttcgccgccaccgacatgggtaaagccatgcattacggcgccctgctcggcggaaaacgtctgcgcccgttcctggtgtacgccaccggtgaaatgtttggtgtgacggctgaaaacctggatgccccggcagcagccattgagtgcattcacgcctattccctgatccatgacgatttaccggccatggatgacgacacactgcgccgcggcaaaccaacctgccacgtcgcctttggtgaagcgaatgctattctggcgggggatgccctgcaaacccaggcatttgcaattctcgccgcccggccgatgccggatgtccgcccgcaggaccgtctggcgatgatcgccgaactggcggatgccgccggtcttggcggaatgtgcggcggccaggcacttgatctggcagcggaaggaaaaaacatcggtattcatgcgctggaacaaatacataaccataagaccggtgctttaatccgtgcttccgtccgtatgggcgcgatgagtgccggtgaagcaggctatgccgtattaccggctctcgacacttacgcacaggctatcggcctggcgtttcaggttcaggatgacattctggatgttatcggtcatacggatgtgatcggaaaaagccagggcagcgacgccgctcacgggaagagcacatatccgtcactgctcgggctgaaagcggctcaggataaagcacaggcgctttatcaggaatcactggctgcgctttcacagcttgaagaacatcattacaacacagcaaccctgcgtgaacttgctaattttgtgattgaacgtaacagctaatccgtccggcacgttccggtattttcagaaactttaataagaattagtgagcattacatgagtattgatatcgctaaatatccgactttggcactcgttgagacgcctgatgatttgcgtctgttaccgaaagagagtttaccgaaactctgcgatgaactgcggcaatatctgttaaacagcgtcagccgttccagcgggcattttgcctccggtctcggcacgattgaactgaccgtggcactccattatgtctatcagactccgtttgataacctgatctgggatgtcggccaccaggcctatccgcacaagatcctgaccgggcgccgtgaccgcattgacaccatccgccataaaaacgggctgcatgctttcccgtggcgtgaagagagtgaatatgatgttctgagtgttggtcactcctccacctccatcagtgccggtgtcgggatggcggttgccgctgcccgtgagggacgcaaccgcaaaaccgtctgtgtgatcggcgacggcgcgatcaccgccggtatggcctttgaggcaatgaaccacggcggggatatcaaatccgacatgctggtgatcctcaacgacaacgagatgtccatctccgaaaacgtcggtgccctcaacaaccacctggcgcagctgctttccggcaagctctacaccacactgcgtgaaggcggaaagaaagtgttctccggcctgcctcctatcaaggatctgctgaagaaaaccgaagaacacatcaaaggcatggtggtgccgagcaccttctttgaagagctgggcttcaattacatcgggccggtagacggacacgatgtactggcactgatccagaccctgaaaaatatgcgtgacctgaaaggtcctcagttcctgcatattatgacgaaaaaagggcgcggttatgaaccggctgaaaaagatccgatcagctggcacgccgtaccgcagtttgatccgtcaaccggcacactgccgaaaagtaaatcgtccaaaccgaccttctcaaaaatcttcggtgactggctgtgtgaagaagcagagcacgacccgaaactgatggcgatcacccctgccatgcgcgaaggttccggtatggtacgcttctccaaatccttcccggatcagtattttgatgtcgcgattgctgaacagcactccgtcacctttgccgccggactggctatcggtggttacaagccggttgttgcgatttactccagcttcctgcagcgcgcctacgatcaggtgatccacgatgtcgcgatccagaaactgccggtcctgtttgctatcgaccgcgccgggattgtcggcaacgacggtccgacacaccagggcgcgtttgatctctccttcctgcgcatcctgccgaacatggtgatcatgaccccgagtgatgaaaacgagtgccgccagatgctgcacaccggttatcactacggcaaaggcccggttgcggtgcgttatccgcgcggcggcggctgtggtgccacactccagccactgactcagattgagatcggtaaaggtgttgtgcgccgtgaaggggagaaaaccgcaattctggtcttcggtaccctgctggaagaagtcctgaaagcggcagaaaacctgaatgccaccgtggtggatatgcgttttgtcaaaccgctggatgaagccctgatcctggagatggcagcgagccatgacacactggtgactgtcgaggaaaacgccgttatgggcggtgctggcagcggtgtgaatgaattcctgatggcgcagcgcaagccggtgcccgtgctcaatatcggcctgccggacagctatgtgccgcagggcgaccaggaagagatccgcagcgatatgggcctggatgcagagcatattcagaagtccatcgaagcgtacctggcaaaagcctgattatccttccggacacaaaaaaccctgctgatgcagggttttttatgtcatcaataatgtctttgccgcttactccgcagccgctttcaccgcaaagtggtcaaacccgctcagggccggttttacttcctcacctttactgaaatagcggatgccgtcactctccggtttcatctgcccgatacagcagaaaggtgcgccggtgtgtgccagtgccatttccagtgcgccacgattgatttccggaacggtaaagcacagttcataatcctcaccgcccgccagtgcacgggcgagagcctgctccggtgatgaacaggctttcagtgcctcagacatcggtaagttatccagttcaatcctggcaccgcagcggctggctttcaggatatggccgagatcggaaatcagcccgtcagagatatctatcgcagaggatgcgagatcgcgcagcgcctgtccctgcaggatacgcggctgcggacgcagatggcgtttcagcagatattctttgtgtgccgggtcttcgggctgcagctcacccagtaaaatcgccagtccggcggcactgtcacccagtgtgccggtgacatagatccagtcgccgttacgggcaccggcgcgtttcatcgcccgcccggccgggaccagaccatgaaccgtcaatgtcaggctcatcgggccgcgtgtggtatcgccgccgattaactgcataccgtaataattcagttgctcaaagaagctgtcgctgaactcacccagccacgcttcatcaatggacggcagtgtcagcgccagggaaacccaggccggatccgcaccgatagcggccagatcacttaaattcacagcaagggatttccacgccaaatcacgggcagaaacggaaggcagaaaatgaataccggacaccagggtatccgtgctgacagcaacctgctgtttttccgctacggtcatcagagcgcaatcatccccgatacccagttcaacgtcccggcggtaatagtgctgccggtcaaaaaaacgccggatgagatcaaattcaccacaagccataatcagaaattccgcaatcagataaagacaaaaggccggttaaaccggcctcttttatatcatgtcatttatgtccttgcataaaagtatcagatgattactttctgcgggcatttggcgcggctttatcaagcacgccattgacaaatttgtggctctcttccgcgccgaacacttttgccagttcaatcgcttcgttgataaccactttgtaagggacatcctcacggtagcttaattcatacatcgccagacgcagaaccgctttttccacctgacctaactcctccagctggcgggagaggtacggagccatcagtgcatcaaggcgcaccgcattcgttgccgcaccgaagaacagctcacgaaaataggcgacatcaacgtctttgacatcctgctctgacagaaattctgattcaacatccgcaatattattgccggataactgccacgaataaagcgcctgaacggcacattcacgagcacgacgacgagctgcaggtttcacacatatccccttactaaaatccggattcagcctttgatggctttaattacattaatcatttccagcgcggtcatcgcggcttccgcccctttgttaccggctttggttcccgcacgttcaatggcctgttcaatattttcggtggtcagcaccccgaaagtaaccggaatcgagctgttcatcgcaacggcagataacccggagctgcattcaccggacacatattcaaaatgtgcggtgccgccgcggataacagtacccagtgcaataatagcgtcatattttccggtatcagccagtgttttcactgccagaggcagttcataagcacccggcacccagaccgttgtaatgttctcagaggagacctggccaatacgctcaagcgcatcaaccgcaccgtctaacaggctgtcgttgatgaagttgttaaagcgggcaattgcgatggcgatacgcgcacccggcgcactgacaacacctttaatgacgttcatagcctttccttcttacgagtttcatactgcggggcgcggattttatcacattctttccgtcaccgcgcctgtgtttttcaaactccggaataaaaattaaattccggcgtaaattcagaggttaataaaccggggtcagccgcaggcggagatccggcccgaccatcgtgcagtcgtcgatccgcaactgcggcgcatcacgcagatgcgcaagcggcggcagtgtaaagagatcctgcgcatcactgcccagaatcttcggtgccagataaagcacgatttcatccgccagtccggctttcagcagtgcgcccgccatatgtgagccgcactctgtccagatatgattaatattgcgtttgccgagctgcatcatcagcagaaccaaatcaacaccacagccgttctccggcaggatcatttcctcaacgtcaccctgccagttatccggctgagaagcgatccgcgccagccagcaactgcccggcaattgtgtgacacggtgctgagcggtcacccgctgacggctgtctgtgataatccgcaccggctgacggatatccgtctccggatagctctgctgcaacgatgccgggaaatccgcatggcggacagtcaggcccggatcatctgccagaaccgtggcactggtggataaaatcgccccggcctgtgcccggaactgctgcacatcctgccgcgcggcttttgaggtgatccactgactttcaccattggctaatgcggtttttccgtcgatcgaggccgccattttcaactgaatatacgggaaaccggtgcgcatccgtttaaagaagcctttattcagcgcttcggcttcctgcatcagtacgccgtggctgacctcaataccggcttcgcgcagtttaaacagtccgcgtccggccacctgcggattcggatcctgcatggcggccaccacccggctgacgccggcatttatcagcgcttcggcacacggcggtgtacggccgtggtgactgcacggctccagtgtgacatacgcggtggcgccacgggctttatcaccggccatgcgcagcgcatgcacttccgcatgcggttcaccggcacgctgatggtaaccttcaccaacgatttcgccgtcacggacaatcacacagccgacattcgggttcggcgctgtggtaaaacgacccagcgccgccagttcaagggcgcgggccatataaaattcatcagaatgcatcatgttcagtcctgcaggcgggcaatttcctcgccgaattcacggatatcctcaaaactgcggtaaaccgacgcaaagcggatatacgcgactttatccagctttttcagctcgctcatcaccagttcgccgacaaacttagcagagacttcccgttcgccggtagcccgtaactgcgatttgatgtgactgagggaggtttcgatatcgtcagagctgacggggcgtttttccagcgccttctgcataccgcggcgcagtttttcttcgtcaaacggttctcggctgtcatcacttttgaccacacgcggcatcaccagctcggcgacctcaaacgtggtaaaacgttcgtggcattccaggcactgacggcggcggcggacctgagaaccatcacccaccaggcgtgagtcgatgactttggtatcaacggcggagcaaaacgggcaatgcataaattatcctgcgggtcaatgaactgttgcggtagtttaccctgtttatacataaaaaacaccctgcatgcatgcacatgcagggtgttttatgttttttcgcggcagaaattacggcaggatagattcctggtccgcgccttctttttccactttctgcacaatcaggtgctcacgcttcatacccagtttcagggccagcgcagacgccacgtagattgaggaaatcgtaccgatagacacaccaatcagcatgaccagcgagaagcctttcagcattgcaccaccgaagatatagagcatcagaaccactaacagggtggttgccgatgtcataatggtacggcttaacgtctgagtcagggaaacgttcatgatctcatacgaggtaccacggcggattttgcggaagttctcacggatacggtcagataccacgatgctgtcgttcagtgagtaaccgataaccgacatcagggatgccacaatggtcaggtcaatctcaatatggaacagcgacagtacgccgagggtgatgataacgtcgtgcgccagcgcgataaccgcacctaacgccagacgccattcaaaccgcatcgccacatagatcaggatacagattaatgccgcgatcagcgccattgcgccggtctgagccagttccgcacccacactcgggccgacgaactcgatacgtttgaccaccgcactctcatcaatgtttttattgatcacattgataacggttttacccagttcctgacccgcagtaccttctgccggcggcagacgtaccatgatgtcacggctgctgccgaagttctggatcagcggatctttaaacccggcctgcgcaacggtatcacggattttatccagatctgccggctggctgaagttaacttcaatgacggtaccgccggtgaagtccagaccccagttaaaccctttcacgccgatgattgccacagaggcaatcagcagcagtgccgagatggtaaatgccacgttgtcccagcgcataaagtcatagactctgcggccgtggtttaattgttcaacagtataatcctgtgccacaacgtgctccttaaatagacagcttattaatacgtttaccgccatacagcaggttcacgatggcacgtgtaccgataatcgctgtaaacatggaggttgccacaccaatggctgtcgtaatcgcaaaccctttaatcgaaccggtaccgaccgcgtaaagaatgacagcagtaatcagtgtggttaagtttgcgtcgataatacttgagaaggcgcctttgtacccttcatggattgcctgctggacagaacgcccgttgcgcagttcctctttgatacgttcgtttatcagaacgttcgcatcaaccgcaaccgcaagggtcagcacgatccccgcaatccccggcatggtcagcgtagcgcccggtaacagcgacatcaccccgacaatcaggataaggttcgccagtaacgcgctgctcgcgatcagaccgaatttacggtagtagatcaccatgaacagaattgaggccatcagcccccacagacatgcttccaggccctgctcgatattctgcagacccagagtcggcccgatggtccgctcttccacaatctggattggtgcaatcagggcaccggcacgcagcagcagtgataactgacgtgcttcattggcattatcaatcccggtgatacggaagtttgatcctaaacgggactgaatattggcaatgttgataacttcttcgtttttctcaaggattgagcggcctgcggcatctttacgcccgctgtctttatattcgacaaacagggtcgccatcggcttatacaggttatccttggtaaaatcggacatggtgttaccaccggcgctgtcgagcgagatgctgacctgcggctgaccgtactcatcactctgtgaagtggagtcagtaatgtggtcaccggtcagaatcacacgcttgtacagggcgactttgcgtccgtcacgggtgtatttcacttcagtgtcacccgggatacggcctgcttcgatagcggcagggtcaacagcaccgttgaccagacggaattccagggtggcagttgccccgaggatttctttcgcccgtgcggtgtcctgaatacccggtaattccaccacgatgcggtccgcaccctgacgctgtaccagcggctcggcaacaccgagctggttaacacggttacgcaggatagtgatgttctgcatgacagcatagctgcgcgcttcacttaagcgctggtcgctcattacggcggtcagcgtgttatctgtaccgtctttgaagactaaatcgcgcaggcgtttagataacagcgagctggcttcggaacgtgatgcatcatcacggaagcggacttccacgccgtaatccgctgatttgcggacagacgcaaacggaatgctgttttcacgcagcagcgagcggataccgtcgaggttctgctcctgcagtttacccagcgcggtttccatatccacttccatcaggaagtgaacaccaccacgcaggtcgagacccagtttcatcggctcgccacccacggcggtcagccatttcggtgtcgccggggcaaggttcagggcaacaacatattgctcacctaagcctttcaccagctcttcacgggcacgtaactggatatcaggatttgagaaacgggcaagtatcacaccgttttccagtgcgaccgacttactcgcgatctgatctttttctaaaatggtccggacctgatccagggtctgttcattggcggcggttccccgcgcgccagtgatttgaacagccggatcctctccatacaggtttggaagcgcataaagcaaaccgatgaggatcgcagcgatcagcatcagatacttccacaaaggataacggtttaacacggcagtcccttcgggaaaatcatactacaggaagattacagcgccttcagtgtacctttcggtaaaactgctgcgacgaaatcacgtttgatggttacttcagttgtttcgttcagttccagaacgatgtagccggtgtcagacactttagccacacgaccgatcagaccaccggtagttaacacttcatcacctttggtgatggagtccattaattgcttgtgtgatttagcacgtttctgttgcgggcgcaggatcatgaagtagaaaatcagcacgaaaacgaccagcataacaatcagagacatcgggctgccctgagaagcggctgcaccggttgatgctactgcgtcagaaatgaaaaaactcatcaaactatcctcttgttattcacataattatcaggcagataaacctgccggtggtgtatcgcctatgttatacaccaccgggtgatcccgtttcggggaaatcactcacttaacggcggaacgggtttcccgatccgctgataaaattcagcggcaaatgcttccagacggccttcttcaattgcctgccggatacccgccatcagacgctgatagtagcgcagattatgaatggtatttaagcgcgcgccaaggatttcattacagcgatccaaatgatgcaggtaagcacgcgtataattgcggcaggtatagcagtcacattccgcatccagcggcgatgtatctgatttatacttcgcattacggatttttaccacgccgtccgtcacaaacagatgaccgttacgggcattacgggtcggcatcacgcagtcgaacatatcaataccgcggcgcacaccttccaccagatcttccggtttacccacgcccattaaatagcgcggtttatcttccgggatctgcggacagacatgctcgagaatccggtgcatatcttctttcggctcgccgacagccagaccgcccacagcgtacccatcaaatccgatttccaccagtcctttcacagacacatcgcgtaaatcttcgtaaacactgccctggatgataccgaacagcgcattcgggttacccagctcatcgaaacggtcacggctgcgtttagcccagcgcagagacatttccatggatttcttcgcgtagtcccagtccgccggatacggtgtgcactcgtcaaaaatcatcacgatatcagacccgagatcgtactgaatttccatcgatttttcaggacttaagaagattttttcaccgttgatcgggttacggaaatggacaccttcttctttgattttgcgcattgcgcccaggctgaacacctggaaaccgccggagtcagtcagaatcgggcctttccactgcataaagtcatgcagatcgccgtgcagtttcataatttcctgaccgggacgcagccacagatggaacgtgttgcctaataagatttgcgcaccggtctctttcacttcttccggtgtcatccctttcactgtgccataagtccccaccggcataaatgcaggggtttcaacaacgccacgatcaaaaattaagcgaccacggcgcgcacggccgtctgtcgtctgcagttcatatttcacaaaacctccggcatcagaaaaacagtctgatgatgtttaattagcggcagtcagtcagcagtcgctgaaatctgccggatcaataattctgtagtatatcagtcgtcgtgaccaactttttcaaatttcgcctgcgggttgcgggtaataaacatcgcatccccgtagctgaagaaacggtaacgttcacgcaccgccgcttcatacgcctgcatggtgtgctgataaccggcaaaggcggaaaccagcataatcagcgtggattccggcagatggaaattggtgatcagcgcatccaccacctgatactcatatcccggataaataaagatttgggtatcatcaaagaatggcgctatcagtgcatcctgtgccgctttcgccgcactttccagggagcgcacggatgttgtgccgaccgcaatcactttattaccccgcgctttacacgccagcacggcatcaaccacattctgcggcacttccgcatattcggagtgcatgatgtgatcttcgatgttatccacacgcaccggctggaaagtccccgccccgacatgcagggtgacaaaggccatttccacgcctttttcgcgcagtgccgccagcagcggctcatcaaagtgcagcccggcagtcggtgcggccaccgcgccggggcggtcattatacacggtctggtataactcgcgatccgactcttcatcagggcggtcaatataaggcggcagcggcatatgaccaatctgattcagaatggtcagcacatcgcgctcatcatcaaaacggatttcaaacagcgcatcgtgacgcgccaccatggtggctttcacgctctcatcttcgcccagcagcagctccgcaccctctttcggtgctttcgatgcgcggacatgcgccagtacacggtgctcatccagcatccgctccaccagcacttcaatctttccgccggaggctttgcggccgaacattctggcggggatcacgcgggtatcattaaataccagcagatcaccgggattgagtttattcagcacttcggtgaagataccgtggttcagttcaccactgataccatcaagcgataacagacgacacttgctccgctccgcctgcgggtagcgggcaatcagttcgtccggcagttcaaaagtaaaatcggcaacacgcatgagattctcggcttcatctcaaaaagaaaaacaggcgcaatagtctagtgccccggtaagcagggcgcaagaaataacccgccgacggcggaataaaaggctgcggtattatgaattttctcgcacatctccaccttgcctcactggcaaacagcagttttctcggcaatctgatggccgattttgtccgcggcacaccggaagaacagtacagcgcaccggtcgcggcggggatccggctgcaccggcgtattgataccctgaccgattcacacccgctggtgcgggaagcccgtcagctgttccgcccggaataccgccgctacgcgccgatcacgctggatgtggtctgggatcattttctttccctgcactggtctcagtttgaaccgaaaacgtcgctgaccgatttcacacaacacgtccgcacagtgattgaaccgcaactggcgttcacgccggtgaaatttcaggagctgaatgagtttatgtggccgcagcgctggttaatccgttatcaggagatcccctatatcggacaggtgttggcggggatggcaaaacgacgtccgaaacttgccgcgctcagggagacaaatcaggattttaccgataattatcagtctcttgaaaagatattcttccgcttctatccgcagatgatggacagtgtgacaaagccgtttacaggtcagtaacggtttttacgttcattcacacaattagcacttgaactttactcaaataactctatcttattcgggtagcagatagaataatgaactattgataggtaaaacctattatattaatcggtattatgatctttaataccatccccggattctttattctgtctgttgtttattgccatactctatataatcttacaggagtaaattatggttctggtaacccgtcaagcccccgattttacagctgcagccgttatgggtaacggtgaaattgttgataacttcaatctgaaaaaacacctgaacggccgtccggctgttatcttcttctggccgatggacttcactttcgtctgcccttctgagctgatcgcattcgatcaccgctatgaagaattcaaaaaacgcggtgtggaagtgattggtgtgtctatggactctgagtttgttcataacgcatggcgtaacactgctatcgacgatggcggtatcggtccggttcagtatccgatgattgcggatatcaaacatgacatcatgcgggcttacggtgttgagtttccggaagccggtgttgctctgcgcggttctttcctggtggacaaaaacggtgttgtccgtcatcaggtcgtcaacgacctgccgctgggccgtaacgtagacgaaatgctgcgtatggttgacgcactgcaattccacgaagagcacggcgatgtatgccctgcacagtgggaaaaaggtcaggaaggtatgaatgcatctccgaaaggcgttgctgacttcctgaaaaagaactccggcaaactgtaagttccggcagttaagagatacaaaaaccagcctgcgggctggtttttttgtgcctgaataacgggcaaaaaaataccccgcacatgacagggtatttttataatccggactatcaggcgtgtttgtgattcacttccggctcagcgcccatcaggcgatcaaccacaatggaaaccaccagcaccgccagtgacggcgcaagccacgccaggtcatatttaaagaacggcagcgactcaatccatgacggcatataagggccgaacattttagtggctttcagagcacccatcgtcccgaggatcaggctgaccagcattgccggcgcaaccacccgtcccggttttttccagaaacgcagtgtgaaactcagcaggatcagcacaatacacggcggataaatggataccagcaccggaatggagaatgcaatcaacttgctcagccccaggttggagatcaccatggagaacgcaccgaggatccacaccagagtacggtaagaaatcggcagataacggctgaagaattccgcacaggcgcaggtcaggccgatcgccgttaccatacaggccacaaaaatcagtaccgccaggaagaagctgccgtagttaccgaaagtatactggacatactcatgcagaatttccgcaccatcggcagggttcgggataatcgacccgctgttttcccctaatttgaacagtgccagatagaccagagtcagcagcacaccggcaatcagcccggcccacatggtatagcgggtcagcagtgaggagttttccactccgcgcgaacgggcggcattaacaatgacaatcccgaagaccattgcgccgagggtatccatggtcagataaccattaataaacccgttggagaacgccatttctttatactccggcgttgccataatggcatcaccggccggccacatgaccgcagccaccccgaggatagccagagccagcattttaaccggtgccagcacatggccgacgctgtccagcaatttacccggatacagagaaataccgatcacacaggcaaaatagattacgctgtaaatcagcagggaaatatcagattctccgcctaccagcggcgcaatcccgattttataagaaacggtggctgtacgcggcgtggcaaacaacggcccgacggacagataggccacaacagccagcagcagcccggcgtatttaccgactggtgtactgagtgcctcaataccgccaccgacttttgcaagtgcgatcactgtcagaaccggtaaaccaacgccggtgatcaggaacccggctgccgccgtccagaccatttcgccggcctgaaggccgaccattggcggaaatataatatttcccgccccgacaaacagcgcgaaggtcataaaacctaaggctaaaatatctcgtgaagttaaacgatgcgccatattatttttgtctgttactgttaatttaatgtgaaatattcaataaaaatatcggaaataaaaatccaactccctgatctgtcaccggcgctatctcctgctgttttaacattctattagcactacgttattcatattaagttaataactatagtgattatatttaaaaaacagtgatatttgccaataactcactacaagtaaaacttttatagcgcagaaaggcaatagtcaaagcaaaaaccagaactatataccgaagtctatttccaaagcagcgattgctgttatgtaagcttcaataaacactatatgatttgtttatattttaatcagacattttaaatctgctgaaattagcagcgattaaataaagaaagcggcaaaagccgctttaatgagaggacttagcgataagccgcgcaggaatggtaaaactgaactccgttccctgcccgggtttgctggtaatatccagatgggtgtggtgatgctgtaaagcgtgtttcactatcgccagccccagaccggagccgccggtctgccgcgaacgggatttatccacgcggtaaaaacgttcagtcaggcgggacagatgttccgccggaatgcccggaccgttatctttcacactgaacaccgcgttaccgttacgcagcgcccagctgacctcaatccgtgtattttccggagtatgatttaccgcgttatacaccaggttcgacatggcgctgcgcagctcttcctcatccccgaaaatcttcagtttgtcatccaccgcaaagcggatgtcatggttaccccggctgagcgtcacggcttcctgctgaagcattatcagcatccccggcacatccacaacctgatccagcccgcttttgacagccacttcaatttttgagagctgcaaaagctgtttaaccatgccgtccatacggcgggtctgctcctgcatggtcagaatcgcttttttattcatcggattatcaaaatcctgatccgcgagcatctccagatagccctgcaaaaccgtcagcggcgtgcgcagttcgtgactgacattggcaaagaaatcacgccgcgagttttcaagacggcgtttttccgtcacatcgcgggcaaccatcagcaactgcccttctgaatacggcatgatgcgcaattccatcatgctgccgttattcagttccagcgtcagcggcagggtatagtcacctgcagtcagataacggctgaaatccgggtaacgcagaaggttaaagatgtgctgcccgttatcatccggccagcggaaaccgagaaggtgctgggcatgtttgttacaccagaaaatattgccgtcttctgtcatcatcaccaccgcatccggcagggattctgccccgctgcgaaagcgtttgatcagggtggcgagttcacggcggcgcttgcggttacgctgctgaagctggtagataccgtaaaaaatcggctcccagctgctgcggccgggcggtggcagcatactgcgatccagccacagccagtcagacaatttcagtaagttatagctgtgccagacggcagcggcaaacagggcaccggcaagaaaccagccggtatagccgaaaaaaagtgacaaaaagagtgccggcaggcagaaaaccagtaattccagtacaatttttttccacgaaagacgctcaagcacgcgcgatcctcttgcggtttaacattattatcagtaacggacagagaagcggtaacccgttccccggactgtctgtatcattttatcgtgtccgtccgcttccagcgccttgcgcaggcggcggatatgcacatccaccgtgcggtcctcaacatagacattttccccccagacatagttcagtagctgttcacggctgtaaacccgctccggatgagtcataaagaagtgcagcagtttgaattcggtcggccccatttccagcgggttctcattactggttacgcggtgggatgccgggtcgagtgtcaggccgttcatggcgataaggtcatccgccgccatcggggagatgcgccgcagaatcgctttaacacgggccactaactctttcggtgagaagggtttggtcagatagtcatccgcgccggtttccagacctttgacacggtcttcctcttcaccgcgcgccgtcagcatcatcaccgggatttcccgcaactgactgtcccgtttcatatgtttgataacctgaataccggaaccgcccgggatcatccagtccagcaggacaagatcagggaaaggctccaccagccgggcaatggccgcatcataatcatccgcctcgataggctgatagccattctgctccagtacaaaacagaccatttcacggataggtgcttcatcttcaacgactaaaattcgtcttgccatggcgttccctgtttaccgttaatttcatttcatcagacagtgccgcgattatgcgtcacttttgtgacagatttatgaatatcagccgatacctcagcctgcaccgcaaagataatgtcattaaactgacatactacacacaaaatgcgtgtcagatcgtaaaacactggatattcatccaatatttatttttaccgcctgatttccgttatactctgttttcagtaaaccgcctaacgcaatgcgcattcagttcgcccggcaggaataaccatatatgaaaatcattcacacatcagactggcatctcggacaatatttttacactaaaaaccggttacaggaacatctgcagttttcagactggctgataaacctgataaaagaacagcgggcggatgccctgattgtcgccggagatgtgtttgataccgcctccccgccgagttacgcccgtgagctgtataaccgttttgttgcacaactgcaacagaccggctgtcatctgattgtgcttgccggtaaccatgatgccgttgccacgctgaatgaatcccgtgaactgatggcctgcctgaatgcggatgtgattgcccggccggatccggcgcgggatctgatcgtactttataataagcagaaccaacccggtgcgattgtctgtgctgtgccgtttctgcggccgcgcgatattctggaaagtcaggccggacaatccgaagcagagaaacaactggcactgctgaccgcgatacagtcacattatcagtccctttatgacagagcggtggcaaaacggactgagttggatacagatgtcccaatcattatgaccggccacctgacaacagtgggtgccaaaacatcggaatctgtccgtgatatttatatcggcacactggatgcctttcccgccggtgctttcccgccggcggattacattgccctcgggcatattcaccgcgcacagtccatcggtgacagcggcaccatccgttacagcggttcccccgtcccgctcagttttgatgaatccggacaggaaaaaagtgtcttcctgctcaccctggatagcaacagcattacggcgattgatgcggtaccggttccctgttttcagccgatggtctgcctgaaaggcgatctggataccatcagtcaggcgtttgaacagtttccgccccgtgatgaacacacacagccggtctggctggacatcgaagttgccgggcgggattacctgccggacattcagaaacgcattcaggcactgacagagccgctggccgcagaagtgatcctgctgcggcgcgagcgcagacagataaccgcagacaacagcgaagctctgcgcgaaaccctgaatgagctgactccggatgatgtttttgcccggcgtctggcactcagtgataccgaagaagaggatattccgcgtctcaccacccttttccgccacgtttgtgagcaggttcgtgaccaggcagagagtgacagcagtgaaatcagtaccggtatcagcggaaaaaacaatacccgcacagacagccggaaaggaaaaagtgaatgaagatcctgacattacggtttaaaaatatcaattcactgcagggcgaatggaagattgattttacggcagaaccctttgccggaaacgggttgtttgccatcaccggcccgaccggcgccgggaaaacgactttactcgatgctatctgtctcgcgctctaccatgaaaccccgcgcgtaaaaacatccgcatcccagaatgatgtgatgacccgccatactgcggaatgtctggccgaagtggaattttccgtcaaaggaaaagcataccgcgcgttctggagccagcggcgcgccagagataaagccgacggtaatcttcagccgccgaaggccgaactggctgagtgcgccaccggaaaaatcctctctgacaaactgacgcaggtcagggagagcattattgagatcaccgggctggattttgcccgttttacccgttccgttctgttatcacagggaaatttcgccgcttttctgaatgctgatgataatgaacgggcagatttgctggaagaactgaccggtacggaaatttaccgtctgatttcccgtcaggtttatgaagactacaaagccgcgcaacaggcgttgtctctgctggaagcgcagactggtgctatccggctgatgacagatgatgaacggcttacgtgtcaggctgaactgaccacactgcagacggatgagcaggctcagcttatccgccagacacagttacaggccgcactgcaatggtggcagcaccgcgacacactgaatacagaaacagaacagcggcaacagcagcatgccgctgttatgcagcagatacaggatgcccggccgcagcttgaccggcttgcccgcgccaaaccggcggaaaaactgcgtccggccagggaggcggtgcagaacagtgccgtcttaagtgcacagctgaccacccgtatgcaggaactggcacaaacaacagagagcaccacccgctcgctgcagccactgagcagtcagtgtgaggaacaacaacagttactcaccgggctgaaacagcaacatcagcaactggaaacactggcagagaacgaaatcaggccgctggataaccggctgcagttgctgaacagtcagtctgatgcactgaaacaacactatcagacacagttacaggaacagcaggcactgcaaaaccaatcggtacagcttcagcaacagctggcgcaaacccgtgacagttatgcacgcagcacacagttcagacaggaaaatgtgcagaaagcagagcttccgtcggcaattgttcagtggcggcatgagctgcacacccggcaggaatatcgtgttcagatttctgcactgacagaacagcagcaggtgggggaagttcagcaacagtcactgaccgcagcacacacagaaatgacaaataaactggctgtccgcaatcagtctgttctgccgctgaaaacagagctgacggccttacaaaccacattgcagcaggcccggcagactgaaccggaccagcagttaaccacgcaactgcaacagaccggtgaaaaacgcggattactgcaaaaactggcatcactggcaccggaaatcgccctgctgacccgtaaccgggaaaaccttctgcaacaacagcatgcctctcaggaagagattaaaacgctgacagaatggattgcacaacaagaaccggttctggccgaccagcagacacatctgcatgacctgacagcccgttaccggctggagcaaaccattgtccggctggaggcagaacgtcagcgtttacaggccggagaaccctgtccgttgtgcggcagtaccgatcacccggctgtcgctgactatcagcaggtagtaccggatgaaaccgcacagcgcctggaagcactgacacacactgccagagaggccgagaaaacactggcagcgaagcaatctcagctagcgtttacccgcacacaacacgaaaaactgagcagtacactgcaggaaaccggagagatcctcgcggcccataccgcacagtggcagaaaatctgtcttgagggcgaatttgactccctgacagattccccggcatcgctgaatgacatcactcagcattatgacgggctgtatcagcagcaacagcaggctcaggaagcccgccatgccctggaaactcaggtattaacactgcaaaaccggttacaggcggaagaggctgaatgtgaacggctgtcacaggcattacagcgcaatactcaggaacagcagtttctgtcacagcagcagacggaacgggccgcccgtctgacgcagctttatcagcagcaacagacgctggaaacctcactgacacaaacagtgaccgcctttggttacaccattccctcaccggcagaaaccgctgagtggctggcgcagcgtcagcaggaaagtgatcagttcgccgcaaatgaacagcagatacagcaaagtgcacagcaactcgcggaactgaccgcacagcagcaaaatctggaggctcagcaggcaaaactgaccacacaactggcagaacagtccaccgcactggctgcactgcaacaacagcacaacgccgtcacggaacaacggcaggcactgttcggtgataaaaatatcagcacggaattacagaaactgctttatcagcagcaggaaacggaaaaccgcctgaaaaccctgatacagcagcgcgacagcctgcaacaaaacctcgcagggctccggggggaagaaaagcggctgcaacagcagattctggatgcacaggagcagcaccaccacaatcagcaggtttttcagcagcaactggcagaaagcccgtttgccggtgaggctgatttcctcgccgccctgctcagtgaagaggaacaccaacagttacaggcgctggaaacagcgcttaaccaggcacaactgaaagccgccaccagtctcggggatgccagaaccgcgctggagcagcacctgtccgcccaaccggagccgttccgcgaacagtcccggcaacagctgacagaatcacataccgccgccacacagcaactgcgggaactgagcagccgtcagggggaattgcgcgggcggctgacggcggatgacaatctgcgggtacagcagcgcgatttactggataaaatcacccggcatcagcaggacgtcaccgaccgcagccgcctcaacatgctgataggctctgccgatggtgccaaattcagccgctttgctcagggactgacgctggattatctgatccacctggcgaaccggcggctggagaaactgcatggccgctatgtgttgcagcgcaaaacggcagacagcctggagctgcaaatcaccgatacctggcaggcagacactcagcgtgataccaaaaccctctccggcggggaaacgttcctggtcagtctggcgctcgcactggccttatctgatcttgtcagtcataagacacagattgaatccctgttcctcgatgaaggcttcggcacgctggatcaggaaactctcgatatcgcgctggatgcgctcgataacctgaatgccaccgggaaaaccatcggcgttatcagccatattgaagctatgaaagaacgtattgcagtgcagatctctgtcagaaaaatgaacggactcgggatcagtaaattatcgccggaatatcgtgttacaacggcgtgatattttcacgctgtcagcacacaatgattaattcaatgatatttattggaaatttttctgtcggccgaattttttgaaacataaggttaaatattttcggtatgttttttgattcattgcttatatgctgttcatcatgaactgaagagagcgcggaaaccggtttttccgacaaaaaatttaacggagagtaacatgtctaattcatttatcgagttaattaaaaaacgcagaacaatttacagccttggtaataatctgcctgtttctcaggatcgtatcgccgcgctcatcaaagaagctgtgaaacacagcccgactgcgtttaactcacaatcatcccgcgtcgtggtgctgtttggtgagaaccacaaaaaactgtggaatatcgtgaaagatgcactgcgcgccattgtcccggcagacgcgtttgctgcgaccgaaggtaaaattgataatgccttcctgtccggtgccggtactgtgctattctttgaagaccagtccgttgtcaaaggcttacaggaacaattcgcactgtatgcggataacttcccgatctggtctgaacaggccagcggtatcgcacagtttgctgtctggactgcactgtccgaagagaatatcggtgcctccctgcagcactacaacccggtgattgatgagcaggtcagcaaagcctggaatatcccggctgactggaaactgcgcgcacagttagtgttcggttccattgaacaggaagccggcgaaaaagcctttatggatgatgaaagccgcttcagaatcttcaactaatcttccggactcagccgcgtattaaacgcagctgttcccggacgcatcaggcgctttacctgtcacaaagcgccgttattaccttctgttatcgtgttaaaatatgccttgcccgccttgtgcgggcttttttttatcaggctttcggccacagccacgccgcaccacggacaccactggagtcaccgtgcaccgctttgcggatcggcgtatcgcactcaccaccgaaaacacgggagcgcatcagcgccggtaccgtctgatacaagcgatcgacgttactcatcccgccgcccagcacaatcacatccgggtccagcatattcacgacctggccgagcgcttttgccagccgctgctcataattcaccatcacctgttcagccggtaagtcgccctgtgacaaacgacggatgatctccgcacctttgcagacctcaccggtcagcgcggtataatcagccataaaaccggtgccggagataaacagttcggtacaaccctgtttgccgcaatagcaatccgccattcctttaaacagccggtcggcttcatcctgccacggcagcgggttatgtccccactccccggccacaccgttaccaccgctgtgaacctgtccgttcagggcaatccccgcaccgcagccggtaccgataatcaccgcgaaaacgaccggaaaccctgcgcctgcaccatcaaccgcttcggagaccgccaggcagtttgcatcatttgccacccgcacttcccgttgcagtaatgcactgagatccgcatcaaacggctgaccgttcagccagaccgaattagcattttttacccgtccggtgaccggcgacagtgttcccgggatccctactccgacagtgccggtctctccggtggcggtttctgcatcgtgaaccagcccggcaatcgcctgtaatgtttgctgatagtcaaaacgcggcgtatccgttcgtttacggaataattcctgcccctcattactgagtgcgatcacttcaattttggtgccgcccaaatcaataccgatccgcatactgtccccttctgctgtggatttacgctctgtctttcatacctctgataatgcagggcagcggcctgacaatcaagtttccgcgcgaaggcattagagcaacgcggcaagatccgttatcatagcgggatgcaattctcaccgcgcaatgaccgcgcatcataaaacaggactgtccgatgtggtttaaaaatatactcgtttaccgccttagctcgccgtttccgctgtctgccgatgagctggaaaaacagctggaacacatggcattcacgccgtgcggcagtcaggatatgatgaaaaccggctgggtttcgccgatgggctcccggggtgatgcactgactcacgctgccggtaaacagatccttatctgtgctaaaaaagaagaaaaaatgctgccatcgccggtaattaaacaggaattgcaggcgaaaattgaaaagctggaacatgagcagcatcgcaaactgaagaaaacggaaaaagattccctgaaagatgaagtggttcatgctctgctgccgcgtgccttcagccgtttcagccagaccgccatctggattgatgcggaacgcagcctgattatcgtcgatgcggccagtgccaaacgggcggaagataaccttgccctgctgcgtaaaacactcggctctctgccggtgatcccgctgaccaccaaagacccgattgaactgacgctgaccgaatgggtgcgctccggtgatttaccaaccggttttgccctgatggatgaagctgaactgaaagccattctggaagacggcggcgtgatccgctgtaagaaacaggatctggtatcagacgaaatcgccacctgcattgaagccggaaaatgtgtcaccaaactggcactggactgggaagagcggattcagttcctgatgtctgatgacggttcctttaaacgcctgaaatacagtgatgatttaaaagacaaaaatgaagatatcgaccgcgaggattttgctcagcggtttgatgctgattttgtcctgatgaccggcgaactgagtgcgctgatcagcaataccattgccgccctcggcggtgaagcggaacactgaaaataagatctgcgggaagcccggtaacaggctcccgctgatatccgctgttatgcccacggcagcggggctttttcatcattaccgtgctcgccgtaatagagcgacggcagaaaacgggacaagtaagtaaactcgttatagcagtgcttcatcagcccgaaaccaatctcatccggcagttccgtcagcggatccgccagtgacgccccgagtaaaaaccggctgcgcagcacacatccgaactctgtatcataggttatatgcagcatttttccgtcgatcgggtaaccgagcgtatcggttttcacatcatccccgaacccgatatgggcgcaaacagcaccggaaatctgatgcgtctgccgcgcggcggccagtttatccgcatcaaagaaatcctgtgcatcgttgaatttcagtgtcgcgccgaccggcgggatcggcccgagagactcaaccgcacggattgtcgccccgatataactctccccttttttccagaccgaatcccagccgtgatgtgccacatgatcatgtgggtgccaccagcggatatgctgcgtggtttcaaaaaacgtgaaccaccactccagcatccgccctttacaaccgtgcaggtcggttctgacagatactgtcagcagcccttcttcgctgcgctccagacccatttccatccgcagtggttcaggagataataactggttaatatcatccggtgcccggggtaagttttgttttttcgctgacatgacgtatactccataattaagaaacgattttcgttccctaattaatattgtcctgtaacgggtatttgtcaattgaggatcgcacgtatggctaataatgaagctgccacagaaccccgcggacgtggccgtccggttgttccgaaagaagaactgattgcaaaaatccgcgaggcatcacttagtctgttgttatcacagggatattccgcaatgacgatggatgcggtggcaaaacaggcgggtgtctccaaaaagacgctgtaccggttcgctggcaaccgtgaagatctggcggagcagatagtgcgcggctggacggattcctttgtgccgctgtttatgcaggatgcaaagactaaagatgaattttatcagctgcttgaaaacaatctgaccatcatgagccacaaggtgctcagtgctgaggcggcgggattattttgtctgctgagcagtgagtttcccggccgggagttattgctgccccgctatcaggcctgcggtattgagcgcggacgtgcgctgctgacagaatggttgtcccgtcatcaggcgtttctgccgctgccggatgcagctcaaaccagtgatttgctgttatcgatggtgatggcagagccgctgcgccagattgccctgaaactggcaccaccagcaccggattacccggtacaggcgcggatccgtgctgcggtggcattactgaaacgctgacgggcaccggcggataaccggcacccgaaaccgcattatttctgtatcagatagcggattgtcggcccgtcctgctggatggataacacggtgtagccgtggtttttggcatccagcgggatattgttgatggattgcgggcagtcactcaccacttccaggatctctccgggtttcagtgacggcatggcttcaagagtcgccactgccggatacgggcacggctcaccgaccatatccagccggtaatccggcacaattgcagtattttcggtattcatggtgtgctccttaatgtgcggcagcggcgacagtgtcagcctggtttttccggcggaagaagcgtttctcccacatcagtaacaggataaaggcaaaggcgagtaatccgtaagtaaccagcagaccaccagccgggccgaaggtatccagcaggttgactttgtcatagtcagtcgccagccacggtgccacggaatcccagtaataagccagaatagtcgcgccgataatattacccaggccgacccaccagaaatgcacctgaccttccacagcacggtacatccagccggtttcacaaccccctgccagcacaataccgaagccgaacaacaacccgccaatcacagcgttaggaccggcccagaagattttcggctctgcgcccagttgcacatagctgtagatgccgatggcactgaccgccataccgaggataatcgctttcgccatctgggtacgcccggtgatccagacatcacggaatgcggaggtaaaacagatttgcgcccgttcaatcagcagaccaaatccgataccgaacagcatcgccatgccaagtttcggggatttaaacagcgtgaacagagaccaggtgacacacagcaggaagatcagcataccgagacgaaaacggcgtttcgcccgctgcaaatcctgtgtcagcggtgaggctttgctgactttctgcagtttgaccggaatgcggaacatcggcagcagcgtaaattttgcgccgaagtaagagcctgcggcggttgccagtgcaaagaaccaggcatggagggagaattgcgggataccggtaaagaaggctgccaggttacaccccattgcaagacgtgccccgaaaccggcgataatgccgccgataacggcctgccagatacggattttgtgttgcggaaggcggattttgacgttgttagcccataaggctgcggcgatacaaccggcaaacataccgataatcatcatgccgtcgatacgatccaggggcgagccctgcaaaccgatcaccttaaaatacccccagttttccggatgagcgccgaacagttgcagaatgtgtccgccccagcgcgtaaactctccggtgaccgcccagaatgtgcctgttaatccgaagtagtatgcggataagatgccagcggcgatcactgcgggcaacggctgccagaacctgacaagatacgttgatttaaatgtagaccagttcatttttttaccaaaaaaatcccgacagcgtcgggaatcgatgtcggagtacgtgtgtaccagtaggatctttatatgtgatccaccggagaatcatactcctgtataagataattcgcttattaatatttttaaaaatactggcatgtcctcggcgctttatgctttcttttttttaccggtcaggtcttctgaatactcactgtgtgccgaaaagaataaaacatcaaaccatcttctttcagattcgggcagcgggataaccggcaaagcggaaagacgctgacacatccttgttcgctcggatcgcgccatccatggcgcttgacgctttcctttttttaccggttaacccctcatatacttcaactttgttaaaaacagaaaacagaaaaatcaatctgctaaatcatccggtttgtggcaaaccgaacgaagccaacacagccacaggccggaggatgaaacagataaatctgctaaatcattcgtttcacaggaaggcggcaaagaaaaatccccggggagcatacatcagtatgtgacccggggattttgctgcagccaacgcgtctgtggagcgaaggatgacgcagattagcagatgcggggcagcggctcgttatacggaagatccaacagcctggtcgcgccgaaaatcccctgcactttcacctgttttgcttctgttacctgcccgatggtacaggcgtcctgacccagagggctgttacggagggctgccagcacggtggcttcggcttccggggctgtgacaatcaccactttaccctcattggcaaaattgagtgcctccagccccaacagctcgcacacaccacgtactgcagttttcagcggcagtttctgttcttcgatattcataccgcactgtgaagcatcggcaaactcatgcaggatagcggtgacgccgccacgggtggcatcacggacagctctgatgccgtcaatcgcccgcaaaggtgcaagcatcggctccagaaccgcacagtcgctgcgcagatcagcatccagcccgaggttctcgcgcagattgaggatcgccgcaccatgatcacccagtgtgccgctgacaataattttatcccccggacggcattgtgctgctgcccagttcagctgatgcgggatcacaccgataccggcggtattgataaacactttgtctgccgcaccgcgcggcaccactttggtgtcaccggtcacaatctgaataccgttggcttttgcggcttccgccatactgctgaccagctgagagagaatgtcaaacgacaacccctcctcaaggataaatccacaggagaggtagcgcgggattgcgccaccgacagacagatcattcgctgtgccgcacacggccagtttgccgatattgccgccgggaaaaataatcggatcaatgacatagctgtcggtgctgaacgccagacgatcaccggcggcctgtaattccgccagcggtattcgtgcctgatcttctttttcattcagatacggattgaaaaatgcctgcaaaaacagggagtcaatcagttgctgcatcccctgtccgccgttgccctgggccagggtgatttcagtaataggtttcatgttattctccgcgccgatactgataataagctgcgcaagccccttcagaggagaccatcagtgcgccgagtgccgtttccggtgtgcatgcgttgccgaacagcggacagtccgccggtttgcagcggcctgttaatacctccccgcaacgggcctgcggattatcggcaacagactgcggctgcggccggaagcggcgttcagcatcaaattcatggtaagccggtgtcagctgaataccggagtccgcaatattgccgagcccgcgccattcactgctggctttcagttcaaagacttccgccagcgctttctgtgccagcaggttaccctgctccggcacaatacggctgtactgattttccaccaccatcggcgcgtgtttgtcctgtgcctgctttttcagctggcggacaaccatcagaatagccgtcagcagatccagcggctcaaagccggtcaccacaaacggtttggcaaattcatcacacaacagctgatacggcgtgcagccaatcaccatactgacgtgccccggcgcgataaagccgtcgataaacacatctttttgttccagcagtgtgcgcagggtcgggataatggtgatgtgctgacaaaaaacggtgaagtttttcagtccggtttttttcgccagttgtaaggtggccgccgtgcccggcatggtggtttcaaaaccgagcccgaagaaaacaacctctttgtccggattatcacgggcaatagtcagcgcatccagcggggaatagacaatgcggatgtcgctgccgtgacggcgggcatccagcagcgaaccgccgcgtccgggaacgcgcatggcatccccgaaagtgcagaaaatcacccccggacgggccgcgatttccaggcaggcatcaatacgccccatcggcagcacacaaaccgggcaacccggtccgtgaacaaattccactgaatcaggcagcagtttatccagcccgaatttaaagatggcgtgagtatggccgccgcacacctccataatctgcaaaggctgtttcagcggatgcggccacgaagccatctcttcccggatctgcgccagcagtttttctgccagtgccggatcacggaactcatcaacaaaacgcatagaaatcccttattccgccgcaccgcgctgctgattcaccttgctcaggcgctcctgtaaccaggcaacccattcatccattccttcaccggtagtggctgacagaacaatgacatcgatatccggattcacacggcgtgccgcattcatacaggtttcaatattgacattcacatacggcagcaggtcgattttgttaatcagcatcaggtctgcggcagcaaacatatgcgggtatttcagtggtttatcttcaccttctgtcactgacagaatggcaactttgtgctgctcacccagatcaaagccggccgggcagaccaggttgccgacgttttcgataaataacaggctgttatctttcagtccgaggtgatgcatagcgtcatgcaccatctgcgcatccaggtgacaccctttgccggtattgacctgaatcgccggtacgccggttgcgcggatccgctcagcatcattggtggtttgctggtcgccttcaatcacggcacaagggactttgtctttcaggtaattaagtgtgcgggtcagtaatgtggttttgccggagccggggctggacaccaggttcagcgccagaatgccctgctcctgtaaatgttcgcggttatggacggcgatttggttgtttttatccagcacccccatctcaatctgcaccatccgtttctgggtcaggcccggcgcgtgtgtgcccgcttcgcccatcccgtaatgcatattgtctttatcaattaccggcgcaaaagccgctgcatggtcatgaccgtggtcgtgttcatgtgaatgatgatggtcgtgagcatgttcgtgctcatgagaatggctgtggccgtgcccgtgatcatgagtgtgttcatgtccgtggctgtgctcatgactgtatccgtgagcatgctcttcaccggcttcacggccgtcataataatagtgattcacatcgccgttatgatgatagtggtggtgatgaatgatgacggggcgggaatggttgtcatgttcatgatgatggtgatcatggccgtggtggtcgtggctgtgaccttcaatctgcacgtttccttcgctgcaaccgcatgtgctgcacataatcctgactcctgctcgatttattggctccggcgcggcattgtggtcagactcgtgacaggtgcggagcatctgatcacgctgtgtcgggcagtcaacataaataaaatattacacataaaagccggtaaaccattaccggtttttatgtatccgttattaattatattagtagcaaatctgcggagtgcccgctttgactttgcgcaggtcagatggattttccctgcgcaaagagtgatgtgtttacgcgaaactcagtggacaaacaccacgtaaacggcagcagccacaataaagcggtagatagcaaacgggataaaggagatacgtttaatcagtgacaggaaggttttcatggcaatcagcgccacaataaacgccgccaggaaaccgaccgcaaacatcggaatatccgagttgctcaggaaatgccagctcttgtataaatccagtgctgtcgcgcccatcatcatcggtacggccagaataaaggaaaactctgatgcagtgtaacggttgatccccatcagcataccgccggagatggtggcacccgaacgggagaatcccggccacagagccaggcactggaaacagccgatggcaaacgcctgacggtagctgatatcatcaagaccagtggcctgcaccttcttcggcttaaagacttcagccacaatcagcaggataccgcccgcaaccagcgcgtacatcacattcactgggttaaacagagacttaatctgatcccgcagcagtaaaccgagaaccaccgccggtaacatagcaataataatgtggagtaaattcagttttccctgagtctgtccttcatggggaacccggccgaagtgaataccgataagggcaaacatccgccgccagaacaggaaaaccactgccagaatggaaccgagctggataaccacttcaaacgtttttgctttatcgccggtaaagccgataagctcagcaacaataatcatatgaccggttgatgacaccggcagaaattcggttaatccttcaacaaccccgagaatcaatgcatgcagtaaacttgtgatatcgcccatataacgccctgtatggcagataaaataaggcactcccggacgcgggaatgccggatacggagaacagcatatgacgcaagtgtgacaatttcatgacaccctcagcgcttttatgacagttccgctgacggcattatgacaacatcaggccgcacttcgttcaataatgacacccacttcttccgcctgtgccacagcacccggcttagccacgcaaatacggacccaaggggtgccgaactcagtcagtaataatgacgccacttcttccgccacacgttccaccagtgcgaactgtcttgtctgcacataatccagaattgcagtgctgaccccggcataatcgagacaatgttccacatcgtcactctcagatgcgcgtttgttatcccagtgcatttcgatatcgagcactaatttctgcgtaatatccttttcccagtcgtaagcaccaatcgttgtaaaaacaacaagtttcttaataaaaacaacatccatccgcatttacctcgtttttttatgctcatcggatatcacttcccatgaaatatgcgtattatccatggaggccaataactgtaatttaccgtctgtcaggagagaagcatgagtggaatcgcgcttggtatgatcatcttcgcttatctgctgggatcaatttccagtgcgatcctgatctgccgtcttgcgggactgccggatccgcggcatcacggctccggaaacccgggggcgaccaacgtgctgcgcatcggcggcaaactggcggctgccggtgtccttatctgcgacgtactcaagggtatgctgccggtctggctcgcttacctcctgcaaataccgtatttttacctcggcattatcgccattgccgcctgtttaggccatatttatccggtatttttccactttaaaggcggaaaaggcgtggcaacggcatttggttcgattgccgccatcggctgggatctgaccggactggttgccggaacctggctgctgaccgtgctgctgagtggttactcatcattaggcgcgattgtcagtgcgctggtggcaccgttttatgtctggtggttcaaaccggagtttaccttcccggtcgccatgctctcctgtctggtgcttatccgccatcatgacaatattcagcggttgtggcgcggacaggaaagtcgcatctggcagaagctgaagaaaaagcgggccaaaacggataaagagataatccaggaagcgaaagagcaggaaaaagaggattaaaaaaaggcgctgaagcgccttttttgtgtccggaaattatttgtccagcggcggtaactcagccagcggccaccgcggacggacagtcacgcctaattcactgcgcataccgcctttgaagcggatcatcccggccagcgcgatcatcgcaccgttatccgtacacagttcaggacgggcatagaacgcttctccgcccagtttttgcagtgtctgcgccatgcgttcgcgcagcgtgcggtttgcactcacgccgcctgccatcaccagccgtttaaatccggtctgctccagcgcgcgtttgcatttgatcaccagcgtatcgaccaccgcatcttcaaaagcacgggcgatatccgcctttgtctggtctgaatcatcattctgatgaatggtattagcggcaaaggttttcagcccggagaagctgaaatccagccccggccggtcggtcatcggacgcgggaaggtaaaacgtcccggcgtgccctgtgctgccatgcgtgacagtgcaggcccgcccggataatccagtcccagtaatttggctgttttatcaaaggcttcaccggctgcatcatcgatagattcacccagcagcgtgtattcaccgataccggtcacactgattaactgcgtatgaccgccggataccagcagcgcgacaaacggaaactccggctgatgttcttccagcatcggtgccagcagatggccttccatatggtgaaccggcaccgccgggacatcccaggaaaacgccagcgcacggccgactgttgccccgaccatcagcgccccgaccagccccggtcctgcggtataggccaccgcatcaatatcctgtgccgtcagaccggcttctttcagcgcagcctgaatcagcggcaccgttttccggatatggtcacgggatgccagttccggcaccacgccgccgtaatctgcgtggactttgatctggctgtataactgattagccagcaaaccggcttcatcatcataaattgcgattccggtttcatcgcaggacgtttcaatgcctaacactcgcatgggacttaactcgctggaacaaaaactgacgggactggcggcggacagcaggaagcaaatccgtctccgcaaagagaacagtgtatcaccataatggcgtgctgacaggtattaaggtgaaatacggggcttttctgtcgtatttttattcagcaaaaaccgcttattcacaggatgaacacagttatccacatacttttcccctgcataacggatttctgttgctgacaaatcgccgcgtatccgctataatctgcaccctctgtaaaacccctgtcgggtgtgcggatccggtcttggcggtaacacctgaccatatccggggtatttctctgtctgattatccacagcactttacaacgtgggtcacattgaagtaaaattccgcaccattttaaagacaactggcataacgccagtacagacctatttattgaggtgagaggcacatgccggtaattaaagtacgtgaaaacgagccatttgacgttgcactgcgtcgtttcaaacgttcctgcgaaaaagcaggcgtattagctgaagtacgtcgtcgtgagttttatgaaaaaccaacgactgtacgtaaacgcgctaaagcatctgctgttaagcgtcacgctaagaaactggctcgcgaaaacgcacgtcgcactcgtctgtactaatcgctgcggccgcgccgcaacttagtcagaccgcagtagttgcagttaatggccgtgtttccggaaggaagcgcggcttattatcgttatcagacaggcgaaaaaggggttatggccgggcgcattccacgcacatttatcaacgacttattagcgagaaccgatatcatcgatcttatcgatgtcagggtgccgctgaaaaaacacggtaaaaatcaccaggcgtgttgtcctttccacaacgaaaaaactccctcttttacagtcagcagcgataaacagttttaccactgcttcggctgtggtgcccacggcaatgctattgattttttaattaattatgaccggctcgagtttgtcgaggcgatcgaagaattagcagcaatgcacgggctggatgttccttatgaaaccggaagcggcagcagccagatagaaaaacatcagcgccagaacctgtatcagctgatggaaaaactggacagcttttaccgccatgcattacaggccgataacgccggtcatgcccgtgagtatctgaaccgccggggtctgagtcaggaaattatcagccggtttgcaatcggctatgcccccgccggatgggacaacgttctcaaacgctttgcccgcagtgaggatgatcgtcagcagttgctggatgccggcatgttagtggtcaatgataacggccgctgctatgaccgtttccgggaacgtgtgatgtttcctatccgcgaccggcgcggccgggtaattgccttcggcggacgtgttcttgatgacgcactgccgaaatacctgaattcaccggaaaccgatatttttcataagggccgccagttattcgggctgtatgaagcgcagcagaataaccgcgaactgtcccgcatccttgtggtggaaggctatatggatgtggttgccctggcacagttcggtattgattatgcggtggcctcactcgggacatcgacaacggcagagcacatacagttgctctatcggacatctgataccataatttgttgttatgacggagaccgcgccggacgtgaagccgcctggcgggcactcgaaactgctcttccccatcttaatgacgggcggcagcttcgttttatgtttttaccggacggcgacgatccggattcactggtgcgccgcgaaggccgtgaagccttcgagcagcggcagaatgaggcacacagtctgtctcagtttctgttcgataccctgctgcgccaggtggatatgagcaccccggaggggcgcagcaagctgaatgccctcgccatgccgctgataagccgcgtgccgggtgaagcccaacaggcgtttttattgcaggatctgggcaatttactcggattaccggatatcacgcagctcaaacaggcggtccgccagagtgaaaacagtcccggttatcaggctccgaaactgaaaccgactaccatgcggatcctgattgccctgctggtgcagaatccgcagtttgcacaattagtgccgccgctggaatccattgataccagccgtattgccggtttttcattattcagggagctgattgatacctgtttatcacagcccgggctgaccaccggtcagttactggaacactaccgtgataataaattagcgccacagcttgaaaaactggccggatggaacgatatagagatagatgagatagcagaaaaaaccttcaaagatgccttaaatcatctggtggtatctgctctcaatgacagatttaacttcctgatcgccaaagagcggacagaaggtctgacccctgaagagcgcaatgaagtgagtcttctcgtgcgggtccggcaataagtattattattaaactatgatgaatataacggcttaagtgccgcagacagcaggaacagccctgcatgccatgtcaccaaggttcatggccgaagaaaagaaatccttgattgttattgttgctggctaagttgttttgccgaccaacacaaacctaaatactcagaagtgtggataccgtcttatggagcaaaacccgcagtcacagctgaaacttcttgtcacccgtggtaaggagcaaggctatctgacctatgctgaagtcaatgaccatctgcctgaagatatcgtcgattctgatcagatcgaagatattatccagatgatcaatgacatgggcattcaggtaatggaagaagcacctgatgctgatgatctgatgctggcagagaattcaacagacaccgatgatgatgcagccgaagctgcagcacaagtcctctcaagtgtagaatcggaaattggccggaccactgaccctgtacgtatgtatatgcgtgaaatggggacggtagaactgttgacccgcgaaggcgaaattgacattgccaagcgcatcgaagatggcatcaatcaggttcagtgttccgttgctgaatatcctgaggcaatcacgtatttactcgatcagtacgaccgcgttgaagcaggcgaagtccgtctttctgacctgattaccggctttgttgacccgaacgcggaagaagatctggcaccaaccgcaaccaacatcggttctgagctgccggccgaagaattaaacaaagatgacgacgacgaagacgaagaagaagaggatgacagtgacagcgatgacgataacagcatcgatcctgaactggctcgtcagaaattcgaagcgctgcgtgtgcagcatgaaaaagcgcgtcagcagattaaaattcacggccgcgaccacccgaacaccaatgcggaaatccagcagctctctgaagttttcaaagagttccgtttagttccgaagcagtttgaccatctggtcaacaacatgcgtgaaatgatggatcgtgtccgtcagcaggaacgctacatcatgaaactctgcgttgagcagagcaaaatgccgaagaaaaacttcatcaccctgttcaccggcaatgaaaccagtgattcctggtttactgctgctgtcgcgatgaacaaaccgtggtctgaaaaactgcaggatgtcgcggaagaagttgaacgcagcctgcaacgtctgcgtcagattgaagaagaaaccggcctgaccattgaacaggtcaaagatattaaccgccgcatgtctatcggtgaagcgaaagcccgccgtgcgaaaaaagagatggttgaggcgaacttacgtctggttatctctatcgcgaaaaaatacaccaaccgtggcctgcagttcctggatctgattcaggaaggtaacatcggtctgatgaaagcggttgataaatttgaataccgtcgtggttataagttctcaacctatgccacctggtggatccgtcaggcgattacccgctctatcgcggaccaggcgcgtactatccgtatcccggtgcatatgattgagactatcaacaaactcaaccgtatctcccgtcagatgcttcaggagatgggccgtgagccgtcaccggaagaactggcagagcggatgctgatgccggaagataaaatccgcaaagtgctgaaaatcgccaaagagccaatctcaatggaaacaccgattggtgatgatgaagattcgcacttaggggatttcatcgaggataccaccctcgaactgccgctggattcagccacctcagagagcctgcgttccgcaactcacgaagtgctggccggcctgaccccgcgtgaagcgaaagttctgcgtatgcgtttcggtattgatatgaatactgaccacacgctggaagaagtgggtaaacagtttgacgttacccgcgaacgtatccgtcagattgaagcgaaggcactgcgcaaactgcgccacccgagccgttctgaagtgttacgcagcttcctggacgaataatccgcttcaggatcagagcattatcaggcgccgtttaacggcgcctttttttatgcttattcattgccggacaagaagtaattcacttacacaattgatattcagaaatcatttttgacaggcaatattccgctcataaaacagtcagatagacaagaaacgctagaccccgcagacaactggcagtataatctcacccacttcggccccttagctcagttggttagagcacgcgactcataatcgcttggtcactggttcaagtccagtaggggccaccaaatttttactgatttatcagtgtattaagccactcttcacagggtggcttttttacatcaggtgctgagtgtcgcaaaagtgatccaccaattttttgatttgtgtgccaatatcaggcaggtaatgcaaatatccctgcaaaccttactaatgatattcataaatctcagggatattgttattctgaatatctctcggaaacgaatgcaatatattaaatcttctttgtcaggttaattttccgcccaaacttcgcttctttgtatcatctcccgtttgttattcagataacgatttttccgcatcaaaaaaccgattacaccggatattctccgataataacaggctgttttcatttatttttctgttggccggataacattgaattacttctttattccgttacactaagtcaaatttttattttctgtcttcctgtttatttaagattaatccgtataaggactgatatgacaaagcaacgtaaactggggcttgctctgcttattgctattgcactgtccggcggggcctggctgacgtattcagtgacgtccggcagcaccccggcagataaaggctatgagctgtatttatccggggatactgacggggcattccgttatttttccgcagaggcggaaaaggatccgcaggcagcttatgcattgtctgttatgtatctcaatggctatgatgcaccggccaatgcgttgctgggttatcagtggctggaacgggccgcgaatgccggtaataaaagtgccttatacaacctcggttattaccgctatcacggtataacacaagataccgcacaggatcagtacggtattacctccctgaaagctgctgcacaggtcggtgtccgtgaggctcaggaattactgggcactatttatcttctcgataaatacggcaatattccgtcagatgcagaacaggcgcggaaatatatgactgcagccgcagatcaggggtcgttttttgcaaaattcgcgctgggctatatcgcgtatgaatatgataaagattataaaaaagcggtcgatattctgacaccgttgctcagcgagcaatttaccctgcctgccatgctgctttccggaatatatgaaaaaggcggtcacggaatagaagccgatccgggacaggcaaaaaaataccgctatatggcattttcacaaatcagctcactcaatgaagatgatttgatgccgaaagcattatcccttttcggctcagaaacggcagatgaaataaccgcccggctggcaaaactggagaaaatggcggagaacggcaataagcatgcccgttatgccctctatgatacttatatgcagggaacgggtgttatcgcagataaagaaaaagccctccgctatttactgccgctgattaatcaaaaagatccgaaagccctttatacctggtatcttgataccaaaacaaatcctgaatatctgacagcctcagctgatgccggatatcccgatgccctttatctgctttatcaaatccaccgtaatatccgttttgatgatgccttcggttatgaccgggagcgtgcggcgaaataccttaaacaggctgcgaataccggacatcacgatgcattaatcgatattattgaggatattgtcagcagctatcagtttccggataacgacaccaacgcacaggtatctgcctatttagccaaattactggaaaaatatccggatgacccggaggcgctgatgctggcttccgcacgttacggtgatcaggaagggaatatttatgatccggtccgggccttcgaactgaataaaaaatcggctgaattatctcccctgccggattcacaggatcaactggcctataaatacgccagaggtatcggtgttgagcaggatatgaaaaaagcggtcgggatctataaatccctgctgagagatccctattttcaggataaggcttaccggcgtttaacggatctgtatttttcctttgataccggcggtgaaattgatgacaaagagattatcgcgttcctgaaaaaagatatcgaagaaaatgataactaccgccaggcgtatttttatgccgattatctgttgcaggaagatccggtaaaaaaccgtaaacaagctatggaactgtatctgaaagccagcgaatatacccccagtgctaatgttcacctggcaaaatcgcttatttcgctcaataccggcaataatgaacaggctttaaagctggcactggaaataatgaaaagcggatatgcccgttccctgctgacggaaaaagaatggcatgatgtcacgcagattgtattctccgaaggtaaaaacaacctccttgccaggcaattctgggtcctgcttgccctgcgggataataacgcggaagcgcagaaactgattgaaccgctgctgggtcaggatcctgttgtcacgtattactatgcgaagctgaaactggaagatgcggaagataaaccggatatgaccgatgagatcctgcgtccggatattgaactgatgatgaaagcggcagcgctgggcaacacagacgccggtgaatacatggtgaatcgtctgaagagcgcgacccgctccggcacgcagagcaacctgaatcaggcgtttctgcggataaccggactgacagaacgcgatattgtgccccggctgacacagtgtgcagatgccggaggatgggcctgtatgtatgaattgggcgagatctattatgaaggtaaatacggtgtaaaagctgacctgaatacctccgtcgcctggtacgaaaaaattcctgatcgcgattaccgtttcacagaatcacgcctgagcaaagtcaaaaagagccgtgacaccctggcagacctgaatgcccgcgtacagaaaggggatgctgaagccgcctatgaattatcttatgcctggaggaacggcaaccacggcctgattcaggatccggaaaaatcacggtattacctgaaaatggcagccgaaggcggtaacgaaaatgctgtcaccacactgattgatgactacaaaaacgcagacacgctcagtccggaagataaaaaattgcttctgtcgctgtatgacaaactcccgggaaccggcaataacagctatctgcgtgatctgggtacacagtacctgcagggcagcaatcttgtcagcgcagatcgtcagaaagcccgttattatttcagcaaagccggtgattacggtgctcacgagctgaaagcaatggatcagtttgaaataaatgtaaaactggcggatgaaagcccaaatgctgcttatgaaaccggttatgcttattttctcgggcgcggcacacaaaaagatctgctgcaagccctgccatacctgcaaaaggcagcagatgccggtcataactatgccacaatcctgctggcagatacctatgaaaagggagagtacgataaagagacacagcgacggattatcacaccggactgggataaagccattgtcctgatacgtgcctacaaagggccgcgtgatgtatcagaaaatatcgcattctatgagagcacgataaaaccggcactggccggagacagcagcgccatgaacgccgccggggaacactataagagcagcggctattatgataccacccgttactggtttgaaaaaagcgcggaaagcggttatctgcctgcattctgcgctctggccggagcgactgaaaccaataacggtaaaatggcggtattacgccgtggcgcggagaaaggtgacaattgctccgataccatgctggccatcatgcagctcagagagaaccgcattacacaggattcaccggagtggaccggtattatcacccgggtggaaaacggtctgaaaaacagtgatgaagaggtgtcaaaagccgcgtttgaagcactgactcagctgtatcgcggcactctcagagatgacaacggcagctatctgtataaggcagacaacaaaaaatatctcacactgctggaatcggaggcagataaacgggcagatgcacaaatcgacctgttctattattaccggcagaataatgacatggataaagcactgtcttatctgcaaaaaggccatgatagcggcgatatcgctgccacagaaacactctacgaatactatatgtcgccggaatattgccgccgtgacaatgccgatcccgctaaagcggagcagtatctgacggagtggctgaaaaaatcggactatccggaaaataccgataaccatatgctgatgccgccggaagagcggaccaaagccatgggtgatgcgtggcttgaaggcttctgtcgccgggcaccggatcctgacaaagctatcgcgtggtatacccgctcactgacgtataacaacacacatgccctgaaaggtatgtatgacgcgcagatagcgaagaagaatgcatcagaagcctattactacggctcacttgccggtgtcagctcccgggagggggacgaccttatcgccacactgacggatgcagaacgcgaaaccgtgctgcagcgtattaagaaaaagcaggtgtatgagcaatacggtcgttatgaacaggaaattgaagcgaagcggcaaaaagcagaaagcggtgacggcccggcggcattctcgctgggggtaaactatgcccgtggcgaacgcgttccggaagatacggaaaaaatgatctattactatgagctggccggtaaaaacgggtacgcccgtgcttacaacgtgctgggtaatctctaccgcaaaccgaatgagcgcgggatcccggtcgacggtaaaaaagccctcgcgtattttgatgcgggagcaaaactgggtgacagcaataccgcacacctcgccggggatatgctctatttcggtcaggccgggctggaaaaagattatccgcaggctgcccgctattatgaaatgacctctcttgaacagggcaatcatcatgaaatggcgaaatataaagtcgcgtggatgtactatcacaaaatggccggtaccggcagcgatgatgatctgcgaaaagcacgggataacctgatattgtcggcaaaatacggcaataaagatgccgcagaagctttaaaagagtgggatttttcccgtatcagcgataaaaaataaataagcggttttattatcagcaccctcccggaatgtgatttgttccggagggtgtttacaatttacctgtccctcacccccagaatatccacctgaataatccgtgaatctgcgcggccgtggtcatccacggcgcggatacggtagcgtccggcggcttccggtttccattccagcgggcggcggctggtgctgttaccgaggtatgcatcaccggcaaaccagtaaatcacactgctgtcattatcggcggtggcggtaaaaaacagggaggatggctgttttgctgtccgtcgcagtgtgtaagtggtgttgcgcagcggagaggtaatttgtggcggagtaccgccgatcaggctgttgccgcctttgcagtgtgcgacagacggcggggttttcttcggcagaccggccagggcaaatacccgtgccaggtcagacggccagtattcatagatatcaatattcacctgtgcaggatcataaggcgggcagaccacatcgccggtgattttatccgtcgccaccgggcggtagatggaatcaaccgcaatgggagatttgcccgggataaaccaggttttgccccgccgctgacaccactgcgtcggcaggttgccgctggccagacaaacctccacctgacggaggttctccggcagcggaaagtccggttcccgcagtgccggatactccgccataatgttgtcgataatattgaaaaacagcggtgcggcagcttccgcgccaatcagcgcactgtttccggtgccgtcaaagttcccgagccagaccaccagcacatacggtccggtgataccgctgctccaggcatcacggaatccccaggacgtgccggttttccagtacaccggcagtgtcatcggtttttgcgcgagggtgttaccgggacgacggtgctgccccagcatatccagggtgataaatgccgcttcctcactcagcagacggaccggcgcagcgggctgttcggattcggtcatccgcagcgggcgcagaacgccccggtttgcgaggatcgcatagagttttgccagctcctgcgcggtcacttcaccgccgcccaggaccagcgacagcccatagtgtttttctcccgccatcccggagagcccggccagacggagaaactgatagagattcggtttgctgagttttgccgcgatatccaccgccggaatattacggctgtagttcagtgcctgtgttgccggcagcggccccataaagcgcagatcaaagttctccggcgcgtagctgccgaaagtggacggcacatctttaagaatggtcagcggatgcagtacgccctgctccagcccgagagcgtaaataaagggtttcagtgccgagccgggagagcgtttggcgttggtgccgttcacctggccgtggatctccgtgttgtaataatccgccgatcccaccagcgcccgcacgcccatatcacgggtatcgacgaggagcaccgccgcattatgcagccccgcctgctgacggcgggcgataaaagcagccacctgtttttcggcaatgcgctgaagattaacatccagcgtggtaaccaccgtctgcggtttttcagcactgaaccggttctgccgggctatctgctcaatcagatgcggggcgatgtaaggcatctgttccggctgacgcagcatcagcggcagttcaaacagtgccgccatgttttcattgtccggatgctcttgccgccagtgctgccagagccggttgcgtgcctgcatcagcggctggctgatatccgcacctccgggtgtgacacgatatcccggcgactgcggcagtaccgccagcgtcagggcttccggcagcgttaaatccgccggttttttattgaaatagaccagtgaggctgccccggcgctctcaatattccggccatagggggcatagttaagataggcttccagaatgtcgtgtttggaatagctcagttccagctgcacagcccgcaggatctgttcggttttcccccgcagggtgcgggtgttgagatgccagcgcatccgtgccagctgcatggtgatggttgagccgccctgaagccgctccccgctgatataactgacaaaaaaaccgcgcgtgagactgtatgggttaaagccggggtggagataaaaccagcgatcctcataacgcagcgttccctctgtcagcagcggggacatttcttccagcggtgtccacagccggtagcggtcatcgtttgccagcgtcaggcgcagcagtgtgccgttgcggtcataataggcaaccgacagaggcacaccttctgacagcggcggatgcggccagaggcggaatccggtcagaaacagcgccagcaggataattactgccgccagattctgtattacacgccggatgccgctcattctgaccgataccgcccgtgcattcagggtttatctgcggcaggcggcagaaccgtaaataccccggctgccgcagactgcgcctgaatctcccggtcatacatggcttcgccgaacgccggcggaatgataaatcgccctgtattcaccggttttatctgatagataaactcctgactatccgccgcggcactgccgtagataagcactctgtcctcgcgggcatcactgaagtccggtacccagcggcggccggtgctgaacgggagctgtgacagttgcaggctgtccgccgcttccggatcctgacgcaccacctcaaacccgcccggcagcagatccgccaccacaatattattcagcccctgtctggcattggcgcggatatgcagacggacatagactttttcgccctgtgccgcactggttatcacctcacctttttcattcaggtaatcacggctgatttccagccctttcgccaccgcagcctgcggcggtgtgcgatcaaaaccggattctgtcaccacataccaggccgggttatccgacggattatcaaagcggatttcactgacaccgtcgctgaattttccggtcgcagaggcatttttcatcaccgaaatcacttcaggcgcttctgtgcctttcagaacgctgatagtgagttcaccggcttgtgccccgctctgctgcatatgacggctgtagtattccattgccagaatactcatggccgctgaataggtggtgtaacgctcatctttaaagcgcagcaccatgttttccagcagttgcggcgggatagcagacactttttccgggaagtgacggacaatcaggtagagccgtgtgctgtcctgcaccagcggatcgaggtagctccgtgtccaccatgctttgctgtaagccgagttcagggctttccaggtcggcgccagcatcatatccgcctgtttatccatcttcagcattttgtaggatgccgcgagatacagcgcgcccgggtcatcctgccaggagtccggataactgctctgcatctgtgtctgtacttcagccagcagtccggtggtcacctcgccctgacgggtcagcaggtagacagcaaaggcgcgcatccgcagatcatcctgcgtattgagcatcgggttcgccgccactttcttcaggtaaatattggcggagccgagcagcgattcctgcaccggatagcccgcatcctgtgcttccagcaggaactgcaccacatacagtgtgacaaacggatcggtttccggcatcgcctgccattcgccgataccaccctgaccgttctgccgcgtcagcagtgtggtcatggtctgttgcagctgtttgcggatttccgtctgtgactgcagtgtgctgatttccggattacgctgactgaacagcagcggaatggcgcggctggtgatctgctccgaacagttatacggataattatccagatactgcgacagcgcctcactcatcaccatcggcgagtatgagacccgcgcatcccgcttggcatagttatcaaacatctgccgcagcgccgtcacccgctgctgtttaccgtccatccgtccgagagacgaacgggtgcggtaagccgaggccgggcggaccgacagattctgtgtgcggaccgccgatttatccccggaagtgacgcggaaggtaatatccgccgtgcccggcagcgcattggctttcaggcggaacgacaataccgtttctttcttctcaccgggcgtgatctgctcatggctgctgccggtgatttccagtgccggatcggcgctgacggtgacatccagcggcaccgcttcaccgttcaggccggtcaggttattggcgataccgagggagacatcaaattcatcccccggggagaccatggccggaatattcggcgtcagcacaaaatcatcccgtaccgtggtgctgctctgtgtgtggccgatgcggtcaggtgaaaccgatactgccatcacgcggatcttaccgttgaaataatccggcacctgataattaaagaccgcgtcgccatcaacggcggtgatccccgaccagtacgctaccggttcatcccgcttacgtttgaacgggttaagatgcagatcgattccctctccggcatccccgcccggtgctgcggtcagcgccatcattttgctgaattccggcaggatcaggtcgaggatctgagtgcttttcacttccagcgcccgtttgcggaagaaatagtcgagcggatctttcaggcggtaacgcgccacctgcaatatgccctcatcaatggcaaagaccaccacattctgcggcgaggtggttttcacatgaaccgccaggttttcacccggtttcatgacgtccggcgatgccagcgtgatccccgcattaaacgcctcatggctgacgcggaacggctgcacgccgaagctcagcgggctcataaagatttcatcggagttaatatcacggacaaactgcacgttaacatagccgttgccggtcagttctgccggtacgcggattttctgcactgagttagtggtgtctgcacggaaccatacccactgatacactttgtcgcgctcaatggtgataataccgctgccggtgtacggcgcgctgacggcaatttcaatctcttcacccggtttatattcctctttattcagcgtcagctgcagttccgcattgcgatccagcgagcgggtgatgttcgcgttaccggcgacggtgtagtcggttctgttcagcacattaccgtccgcatcttccgcctgtaagataaagtgaccgggtttcgaggtattcagtgtgatatcagtgccggcgctgctgatagtcagcggttgctcatcaatccgggtttctttcagtctggactgatatttgaagaccccggacggctggcgcatcagtacagaaatgtatttctgttccagaagcaccagtttcagattggttttttcgatgcgggtcagtgacggatccaccgcaatcagattcagcatccgcactgcatccttactgatgtaatccgtgtcgccgtccgctttgatacccaccagcgagtcatgcggggagaccagtacccgcgctgctgccgtgactgaacggccgctgcccggctcaaacgcttcggtgaacagctgtaactgataggtcgcttccgcgtaattttccagccctaacgccagcagtgcggcaccgttttcatcggtggtgcgctcttccagctgggtttcaaagttatccgtactgcggctgttttcatagaaacggtaatccggatactgcgtgaatgacggataaaccggtcgcatggtcatttttgtcgcgatacgacgattctgcgccggggtgccgaacaggttctgcacatcaaccgccgcctgtaattcatccggtttcacccagccctgctgacgatccggcgtcagtttcagtgccactttcatgctgtccggctcaaactctttcaccaccacggtggtggtaccgagcagacgcaggtcattctcatctttaccttccagatagagatagatattccagtcgccggtcggagagttttccgatgtggtgtagctcagttcgctgaaaccggtggcatccagaataatctgctgtgaatgcatcagagtgtcacgcgggtcgcggatctccgcccgcagcgggatgccggtcagcggggttttccagtcataggtacgggtgataagcccggcatgaaaggtttcccccggccggtaaataccgcgatctgagaaaagatagctgctgagggtgcgcggatcttccggggtttcgtcgccgtaaatatcaaagcgcgagaaatccggctggcggtcataccaggcattgaccggcaggaaggagacatccccctctttttccgccaggaacatcaccgccatctgctcattacggaaatcatgcagcggcgggaatgcggcgtggccgtcactgccggttgtacggctcagcagtgtggtgccgtttttggccaccacagaaacgtttgcgccactgaccggctcaccggtatacacggactgcacgaacacatcccgcgagccgtcgggggaggatttcgcgatgatccccatatcagtgaccaccacaaagcgcgagtcgagaaccgcatcctcttcgtaatcctcatccccttcgtcatagctttccgcttccggggcttccgccggtttagccggatcccacgcccgcaggctcagcaggaatatgccgcgttttgcggatgggtcagctgagaggtatttgctcaggtcgatacctttgtactgaatatcgacggggttggcggcagacagcgccgtctggtaagtaaagtgctccgtaaagtattcatcactcaggcggttaaaatccgttgaggtaaagtttttatccttaaaggagacgatgtgctgtaactggcccgggatcacccgtttcacatccagctgcaggcccgggaagttacgtgccgcgacggtgatctgtttttcacctttcatcgacagcagtgccccgtcagacataaaacgcagtgttttcgggtaatccgggatgcgtaccggcagatagcgtgatgttttcagataataaccgcccgccgaactcataccgccggtgatctccaccagcagccagcggttggccggggcgttataactgaagctgaatgctgcctgattctcctgctcgctgtcatccggggtcagcgtgaccggctctgataatgtgatgactttttcgctgatatcgtctgatttccagtcgtcgtaaatcccctcagaattataatcagggtgtttttccggcagcagacgggcacgaaccgcttttgtgatctgtttttcattcaccgggtcagagaatgacacaatcagggcgcggcgatcttttccgtcatctgattccaccagctgactatcgatgcccgtcacatccagactgtagcggttcggcacgatcacgcggaaggtttcatctttgtccgtggtattggccggaacggccgccccgacaccggctctgactgtcagcaacacttcgctgtctgtatcattgagtgccagctgcccggagtggatccaggctttgagttttttatcatcataagtgacggtatacggcaccggcttgccgtcacgggtcatggacagacgcgattccagatttttgacatctgccggggcattgaaggtcaggccgataatggcgtgttttttcatcggatcctgtggatcctgatagaactccgcccggccgccgcgataataaaactcaggggtggtaaaggttttttgtttctctgttaacgccacctgcggagccagcagtgttttggcatccatatcgacggtgtaggttttccccatcgggaaggtttttttcgccgtgaataccagcttacggtcattacgccactgccactcaccttccattgcgggggtcagggtaataccggccgtgaccggtttgccgatcagtgtcaccggtgcggcagagcgggagaatgtcaccaccacaatctgcgctgaattatcgtcacggttataattaaccgccgaagggcgctgcacagacgcggaaatatcctgcaccaccagcggcgcaacatccaccggcttcggtttgttctgataccagtgccaggtgtaataactgcccgctgccaccgcagcagtcagcaataataaggcagatatggttttcggatagcggtttacaccccgctccagccgggcaagctgattaccggcaaaggtcacccagcccggcaccgcccagcggatccgtccggtgaacgggcgcagcagaaaacccagcagagtaaagagataaacaagactgcgagccgccagacgcagcaaaataaaaggtaagcggaggataaaacgcagaacgtccatgacaacattttcctctgtgtgttgagactgacatcagtttgccgcagcacacagtgaaatccggttcagccggaagctgtcagtgcccgatactctcatcctccataaaacagcccataaagcaaattattgtataaggaataatcttaaattacggccccggcgtatccgcaggggcctgttcagggaaaaaattattccagtgcactcaaaatagcctgtgcggctttgactctttcggtattcgggtagtttttattcgccagaatcacaatcgccacctgtttttccggaataaaggccacataggcgccgaaaccagttgttgcccccgttttatgcacccaggaagcacggttatatggctgaacctggttgtctgttaccgggtgcggctgcaatgcgacctcgttggtcacgccgttaatgatcatatctttctgctgcggccagtcatacatttcccagcccagcccctggttaatcgcggcggttttatagtagcgggtctgtgcaagatacattgccatttccagatccgcattaccggcccgtgacggctccatattcatttccgcccagcgcagcatatcttttgaggcggatttcacgccgtaagattccgcatcaagctgtcccggcgacacgcggaccggttttttgtttttataaccgtacgcatactggctttgcgcactttccggcacagtaataaaggtgtgagataaccccagcggtgccaggatccgtgcagtcagcaactgctcatacggcatccccgccgcgtttgcggtcagagcaccaaacaggccgatactgctgtttgcatacagacgcatatcgcccggtttccgggacggctgccactgctgatagaaattcagcagatccgcacggctttttaccgcatccggcacctgtaacggcagtccgcctgcggtataggtagccagatccagcaatgtgatccccttccactgcggcagagccagctccggctggtattttgccgccggatcattcagcgccatctcttttttcgccacagaaaccgcacccagcacacctgtgaaagttttacttacagatccgagctcaaatagtgtattttcagtgaccggctgttttgcctgaatatcggcaaaaccataattgaaataatagggcttaccctttacggagacggcaaccgccatcccgggaatatcctgctgtgccatcagcggtttaatggtgctgtccaccaccgccgcgacattatcagcggcagaaaaccccggggcggaaaacgccagcagagcggaaatcagtgttgcagataacgattttttcatcagaattaaccttccgtgtgtgagtgacggcggcaagtatcgtcagattcaccggacagaacaaacggttaattataacaagagcctaaagaaaaacttacaggtggattatggtcagacgttatctcccccttaacccgctgcgcgcctttgaggccgccgcccgtcatctcagttttacccgtgcggcgattgagctgaatgtcacccatgccgccgtcagccagcaggtcagggctctggaagaacaactcggctgtgtgctgtttacccgcgtctcacgcggactggtgctgacccatgaaggtgagggattactgccggtgctcaatgaggcgtttgaccggattgcggatactctggagtgtttttctcacgggcagttccgtgagcgggtgaaagtcggtgcggtgggaacatttgccgcaggctggctgctgccgcgtctgaccggattttatgacagccatccgcatattgatctgcatatttccacccataataaccatgtggatccggcggcggaagggcatgattatacgatccgtttcggtaacggcgcgtggcatgagtcagatgcggaactgattttcagtgcaccacacgctccgctgtgctcaccggccattgcagaacagttacagcagccggatgatgttcaccgctttaccctgctgcgctcattccgccgggatgaatggagccgctggctggattgtgcgggcggcacaccgccttccccgtcacagccggtaatggtgttcgatacctcactggccatggccgaggcggcacaactgggtgccggggtagcgatcgcaccggtatgtatgttcagccgcctgttacagtcaggcgcactggtacagccgtttgccgcagaaatcaccctcggcggctactggctgacgcggttacagtcccgtacggaaaccccggccatgcagcaattcgcccgctggctgctgaatacggcggcggcgtaaaactcactcaccttccaggctttttacccgcaaatcatcaccttcactgatgcgcagccgttcactgccgcagtgcggacagcatccggcgtgctgcatgatttcggcctcacggctgcaatcccagcaccatgcctgtgccgggataacatcaatatgcagtgtgcagccctgcgccacggtatcacggcaggcgatatcaaaacagaaatgcagtgcactctcctcaacatccgccagtgcgccgacttccagccagacatccgttacccgcgcaatgccgtgctgttcagcctgttcgcggataatgtccgctgcactcatacacagggataactcatgcatgccggggtaccggttttccggtaaacagcgccctgcgcccggccatcgccggagcatccgggtccgtgaccggcagtgaaagcagcatacgcgcactgtcatccgccagccgcatcccttcctgcggtgacagtgtatgcggcaacggcgacagcagcgaacacgccagatactgagatacgccctccagctcaccgacggtgaatgtcatgatgccgtacggcagccgcaggccgattttttcactgactttacgctgcggccagagctgctccggccccggaaaaatcacggcactgaacatccacggcgtgatcacacaacccgtccactgcccttcaaacagcgtcagttccgtgacataaaccggcattgacgggtgcaggaaggtgagatcgtgcatagtatccgccgctactttttcaaacgcgttgcggatctgctctgtcgggctgtgcataaagccctgaatatcctcaggcatctgccgtctccttcttcaccacctcaacaccggattcacgcagtacagccagcacctgctgcagtgccggttcaacggcagcctgcagttgcggggtcagaccgatatccggctccagcgaggccggaaccacgcccaccagcgtcagtttggcggggaattccccggtaaaccgcagcgcggacaagacatcggataaccccagctgatgcggggagattttattagtgaacagcgccggaacctcctcatcccgcagaatgcggatggtgcccggggcgcttttcgccgtcacaatagcgtcagtgataatcagatgatcccgcccggccatgctgtcgagcagttccatccccgccgtgccgccgtccatcacttccacataatccggcaggatatagcgctccgccagtgcttccgcgatatgcacaccgatagcttcgtcagtcagcagaatattgccgacacctaataccagaatccgcattacagcaccttcactgataccgtttcacggccatcaacatcaacaatatgaaccgcacatgccatacacgggtcgaatgagtggatagtgcgcaccacttccagcggtttttccggatcagcaattttcagcccgaccagcgactgctcatacggccccgccacattatcgtgattgcgcggcccgcagttccaggtggacggtaccaccgcctgatagttctcaatcacgccgtctttgatcaccacccagtgcgataacatgccgcgtggtgcttccaggaaacccacgccttttatcacgccggtggccgggaattccggtttcacataagtgatatgatccccggtaccgatattggcgatcagcgcggcatactggttctgcaacaccgcctgtaattcacagcagtgcaccgtacggccgataatccgcccgagtgtggaatgcagctgttttacctccggggtgttgccggtcagggtctggtaaaccgcgataatttcattcagtttttcggctgtgccggggtgttttgccgccagtttacagaacatattggccagcgggccgacttccacggttttgccgtacagcgtcggtgatttcacccacgagtatttaccgtccggatcccagccggtgtatttcggctcagttgtgccttcccacggtttctgcggcgcttcatcctgataccaggagtgcggagaactttcctgaatcccttccagcaggaaagcatccgtctgggaatcgatcgggcggaaagtcgctaagtcagcgttttcaatgtagccgcccgggaacaggaaactgccgtttttgccgtcggtcgggaattccggggtgctcaggtagttcactgcgccctgcccagtttcaaaccactgcgggtaaaatgcagcaatgaccgcagtatcaattttataaacctgctcaacgaaatcattcagcttgtcgataaatgatttgatatacatcaggcgttccaggttcagcacaccgataccgtcgaggttaatcgggtttgccacgccgccgaccgccaggttctgaatgtgcggcgttttgccacccagcagcgccacaatacggttagcatcgcgctggcattccagcgcctgtaaatagtgtgcgacggcaatcaggttcacttccggcggcaactgcatcgccgggtgtccccagtagccgttggcaaaaatccccagttgcccgctttccaccagtgctttgattttatcctgcactctgacgaattcctgcgtgctgttgagcggccagtcagaaacgccgttcagcatggcagaggcttttgccggatccgctttcagcgcggaggtgatatccacccagtccagcgcggagagctgataaaagtggacaatatgatcatgggtggtgtgcgccgccagaatgatattgcggatatactgcgcatttaccggcacatccaggttcagggcattttccacggcacgcaccgatgccagtgcgtgtgtggtggtacagacaccgcagatgcgctggaggatcatccacgcatcacgcggatctttccctttgacgattttttccattccgcgccacatggtacctgacgcccaggctttggtgaccacaccatcgccgatttcacagtcaatgcgtaaatgtccttcgatacgggtaaccggatcaatcgtaattctctggctcatgacttacttgcctcatgataagggtgagctgcggttttattgactgcagggagtatcggtaacaggcggatcaggaaaaggtaagcgcagatctcaacagccacgaaaccaatggaaattaacagttcttccgccgtcgggaagtagtgatagccattgccgggatcaaacgccagcaatgaataggcaagacgccatgccgcacagccgagcatcatgctcagtgcgccaatgtagagcagccgggagtcacggcggaacgccgggatactgaagaccgccagtgcaatcgccatcagcacaatctcgcaccagaacagcacagcgtaataatccccggcgaaagccagtccgagcttgccgcggtagatcagttccccgaagcgcagcaccagaaacagtgccatcagcacactgacggtcagtgccagcttgccgaacaggcgtttttcatcgggaccgttgcctttcaggccgctctgtaccagggagccttcaaataccacaatggagaatcccataataaaggcggtgagcagagagaacagcggcagcatttcataactctgccacaacggatgcactttatagcccgccgcaatcatcagggagcccatcgaagattggtgcatagccggtaacagtgcgccgagcgctatcacaaagaacatgattttgttcaaccgcttaagggagactttccagcccatacgctcacagaatgccggtgccagttccagtgccatcacgccgatataaatcgtcatacagaccgcggtttccagcaggacggagttgacgttgaaaatacccggaataaagaagttcggcatattccagtaacggccgaggtcaatggtgatagacaatccgcccagtgaatatcccagcaggctcgccagcagcgccggacgcaccagcgggtgatattcccctttgttgaacacatacaccgcccacgccagcgcccagccgccgcaggcaaaaccggtgccgatcagcaggtcaaacgcaatccagatcccccacggatagccgccgttcagatcagagactgaccccagcccgaagaccagacgtttgacgataagcagaacacagaggataacaagcggcccgaaaatgatgatcggcttactgaataatttgccgccgaggggtttgggatcatgactcatgatcatcacctccgtcgtgagtgtcatttttgctgttgcggcgcaccagcacagtgagcccggccagtaccgccagcggcaggatcatccctttgtacagggtgtgctggatgttttcagaacgggctccggtagagagctctgccagttccggcagttgcagatttttatacggcacgccggtcagtaccatcacctgagttccgccaccctctttttcgccgtacagatgcggataataggaagacacgggatgtttgtagttatcgccggttttcagtgtctggcgcggataggcatattcctctccggctgtcagcccgagacggtttttcgcctcgctcatcagatcttcgcgggtgccgaagataatcgccccggtcggacacacttccacacagccgggtaaaccgcctttatcgagcagttcaacacccttctggttacagagttcgcacttgtggatcataccgaacgggttgtcgtaatcgtatttcggtatatcatacgggcagccgaccatgcagtagcggcagccggtacagatgtctttgtcataatgcacaatgccggtaaccggatgctttttcagcgcaccgaccgggcagactgagacacagttcggatccacacagtgcatacattgcttcttgatgtaggcataaccgtccttttcctggtctttgtgttcgccggtaccgctcatccacacctggataatgttgttggtgtacggcgacaacttgtcattgttggaccacgtctgcgccccttccgggttacggccggggaaattgatatcctgacatttggtcacacacgcctgacagccgacacacagagtggagtcatacagcatgccgagcgcaccggggatcggcgggcggttctccgccgccgcgtggctcacggatgtattacctaacagtaatgccccgccggaagccactttaataaagtcacgcctgttcacagttactctccccgcggatcgccggaccggtttttcttctgctggcggcccagctcacggacagccatcacactgacaccggccaccagcccgaccacgccgccgagcagcccgatagcgccacccgataccgaaccgccctctttcagctccacatccggtttttcagaacgcggtgtctggttctgtaccccggcgagctggtggatccctttgtggaagcccacgccggcctcgttacagccatagcagggatgcccgatagccaccggccacacaccgccgacatcacagaactgcaatgtggagcagttgccgtacgtttccggccctttgcagccgaggtgatagaggcaccagccttcacggtgaccgtggtcgccgaatgctttggcaaaacgtccggcgtcaaagtgagcgcggcgctcgcagtgttcgtggatcagacgaccgtaagcaaacagcggccggtttttatcatccagccccggggctttgccgtaagtgatgatatgagcaaccgttgccaggaagttatgcgggttaggcgggcagcccggaatattaatcacggttttaccgggcagaaccgcttccagtgatgccgcgccggtcgggttatcaccggcggcagccacgccgccccaggcggcacaggagccgatggcaataatcgcggcagcgccctccgccgcccggcggatatggtcggcaatcggctcgccggcaatcatgcagtaaatgccgtcatccttcagcggtacagagccgtccaccaccagcacatatttgcctttgtatttctcaatcgcattgtgcttgttggcttccgcctgatgaccgaatgccgccgagagtacctcgtggtactccagcgaaatcatatcaaggatgagattttcgatggtcgggtgcgtcgcccggagcagggactcagtgcaaccggtacactcctgtgcagatatccagatgacgggggggcaatccttacggctgacggacgccgcgatttcggcagatgcatttgcactgagacccatggtggccgctaaggccgcacagagtttcagaaagcttcgccggtcaataccctcagaagtgatatcagaagtaataaaggtattatcttcgatcattctctatattccgttgtgttaatttaatattaatataatccggttattattaaattactgagacacggaacataatcaataaacaaaaaaataaaatctgaaatattattttacagataatgagaattttttctatttttaacatttaatctatttatcggttttattaatttatatcaatttaatatatagcgcaccggctacccgcaatgagaatggcggaatttttcactaccgacaggaaaacaggcagcatttaccatctgcttctcacccgttattcagatacaaccctgcgtgttttcagaattaactgaatcagggtgaataatgaatttcacataaccacagccatttaaaataaaaatgaaatacattctcatccggtgttatttaatcggttaagctcaaataaatgctattttcaataaagtcacgcagttatttatcactaaaaaaatcaatttccataatatggagagttatttattttgatttaaatcaattaatattaaatatcttatttttcttccgggataaatcaaatctaattaatcagctattatcaccacaaaaagagtaaaaatagtgaataacacctgaaaatgcataataagacgattatccttgtaaaacagtcagctatttatacgtaggcggacaatttatattctgtttattattcgttttaatagtgatgatcacctgaaacaatcatttcattttcatcctttctgtcttttttaatgagatgagcatcaaaaccgatgccgcccgctcattcagcggcttcccggggggaattaccggttctgatagtcagtaaaacacaacggcccggatcccgggccgtttttctatctgttactaactgatcagaccgtgtaccagaatcacaccgatacagatcggtcccacataacgccagaccagtaataaactctgacgtttcagtccggtaatattttccggaatcagcgcattcgctttacgtgaccagccgaaaatcaggcagacagcaataccgaacagcggcatcagaatattggatgtcaggtaatcgaggatatcaaaaatcgttttcccgccgagcgtcacatcacttaacggcccaaaagataatgacaccgggatccccatcaacataatcgatgccgtcaccaccaggcccgctctgcggcgtgtccactgaaaacgcatctgaacatacgccacaatgtgctccagcagtgagatagcagatgtcagcgccgccatcagcaacaggacaaagaacgtcactgccagcacagatccgcccggcagatgggcaaagtacaccggcatggtcataaaggtcagacccggaccggcattcgcttccagaccggccgccgctaatgcagggaaaatcatcagtccggccagcacacacaccatgcacgagaggatcaccacccacatactggagttggcaatgcttttgttatcagacaaatacgcgctgtatgtaatgtggatccccagaccgatagagagggagaagaaagccagccccagcgcatccagcacgcctttgccggtcagtttgctgaaatcaggatacaggaataatttcagtccggcggatgagcccggtaagcttatcccgacgataatcagcacgatcataataataaacagtaacggcatcattactttcacggatttttccagcccacgctgcaccccggccagtaccacaaagcaggtcatccccgcaaacaccaggtgggcaatcaccggccaccacgggttactgataaagcgggtgaaaatgccggtcagctggctgctgtcagtaatgttcagctctccggcggcggccatcacggtgtaaccgatagtccagccaccgaccacgctgtagaagctgtaaatacaccaggagctgaatacgccgataaccccgatccacgcccagtggcgtcccatcatttttttaaaggcgttgacggcttcactgcgggtgctgctgccgaggatattttcagccagtaataccgcgagaccgataacaaagctgaataagaggaaaacaaccaggaaggcgccaccgccgttattggcggctacatacgaaaatttccagatggcgccgatgccgatggcagacccggcagcggctaagatatgaccaaaacgggatgtccattgctgactcatacggcctcctgctgtgttatctgagagacagaagcggcggcagaacaacagaccgatcgtgaaactgcgctgataataatccttgcggtaaaacctgacatcataggaactctcccgaaaaaaacagttccaccagcaggtttacacgcacaaaaaagccaccttactggtggcttatgaagaaaaacagataaacgaagccacctaactgagtagtaggtttaggcttagctgacggttcatcatgcggttcatcggtttactcttctctgaaaatcattaatttttgcttcacaggcagtgccgttatatgacacggccttgacgctctttttctcttataccacaaacagaaaagaaaaaaacacccttttttattctgcactcatggttttaagcatttttgcaaatgcatcgatatgatgacgctgcgtcaccgggttcataaagaccgccttttcccccggaatatacgcgaaccggttatgctccgcataggccgagcaggcgatagaatccacccagttggtaaacagtcctgctttaccgcgtttcaggaacagctcacgatgccagcggctgttgcgcaccatcatgtcataggccgttttatctccggcacaggtcagttcgtgtgcaaacattgcctgcggatcattcaccagtttcggtgaatagagacggaaaccgacactcggcccctggttttccggcaccatcacacaggcattgcccatggatagcagttggttgcgcatgtagttcgcattttgcagacagtgcgcaatgatggtctgataaccctcaacccccagataatgcaatccggcataagccccgaacacaccgacaccgctgcggctgcattcaatggtggattgcaggtgagtctgcccttccagcgcatgctcaaaataggtgaagttttccgggtcattttccagtgctttgaaatcatcaccgtcacgcaccatcaccagactcgaggtatacggcacataaccccatttgtggaagtcgatagtgatggaatctgcatatttcagctgtttaaatttctcaacattgtgacgcagaccagccagggtggcatcgttaatcgccagcgggttggtgttaaaatcataatcaataaagaaaataatcggccagccgaccgccgcatccacgtgaatatgcggtttttctgtaatttcgaactcttcacacaggcggttgcgcagatcataaacctgtttgatttcatcgacaccaaaggtatcggttgttcccgcggtcagcaggatcaccgggatcttacagtggacggtatagcaggcacggatttgctgctccagatccgccaggtcaatggtgttatctgacgccacccggatacggattgttttatttgtgatatccacacctaacagggacaggttagtcatattggagtagtgaccgccctgtgagttgatgatccggaaatcctgatcaacggacatcccgagatgttttgactgtttcagcgatttacggatcccgaagagatagccgtacagattgcacatggttccgccctgggtgaacagaccggatgctttgtccgcatcatagccaatcagattggccactttacggataacggttttttccatgttatccgccacaccggagtattcgcagtacaccatgttcgggttacccagcaagcccagcatagagccgtaaactgccgggtctgacggcatggcgataacgttttccacggccagcgggttttcccagtttttgcacagcgcggacgcaaacaccagtaaatcatcctgcccttctcccggacggatcacgttctgacggacatgtgactcaccggccagttgtgcaaaaagatccttaccctgcggatagcggttgatctgctgcacatccgcgtcggtggtctggcggaactgagtaattgcctgaatttgcgggtgattaaaaatcggccatttgccgggatcccggctgaagaaatcactgatgacgttttggtatttaacttcgaaatctttatttaacgcattcgcagaggcgagcgtgataagttctgactgattcacaatgagctccaaaatagtaaattacgctgaggtaatgtcattactttgcgccaaattcattgcattttaaatgatctcagaactataaatcacgttacgaaattaataataaaatcataaatatcaataatatatatacattcaatgcattttatgatgactaataatttttcataaatgtcgatacgatcacaattttttactctgtaaaataaacataattcagtttttaaattcataaattaagcgaaaatacagttttatattccacaaaacaaagcaaattacaaattattaacagaaaaaagaagacgggtcattaatattgtttagttttcattactatttttctctgttgttatttctcttctgctgaaaaaccacggttattttgccggtttttccgttttttgcagtggttattccctccggcaagataaaataccggcggataataaaaatcccctgaatattactaatgaatcccggcagcccgttttccgtcggtggcagcaaatacacgaataacagtatgattttaaataataatttaattttcatcgtatttaccggtgataatacaaccaattgttgtatttttgtaacagccggatttccacggaatccttaaattccgttaagactgctgcccggcgataagctttttttaatttttatctttattctgccgttaaaatgggtgaattgtttcactgtgtaataatttcattcattaaaggcactactatgtccggcctcctgctgttcaaacaactactcaccaaagaatgctgtcccggtatgcactgggactccgcccgtaaccgcttaaaattcgcggcccgcagcctgtttatgccgctgtccaccatgaaatacctgtccggcctgacaaacactgcctgctgtgatgctattctgaaaaagcagccgctgctgccgaccaaattacagcgcccgtatctgagcattaattttcaccggaaaaacaaatcggcggctatctgcgaccattaccggatcaccaaagccgttctgccaccggctgtattcagccgtatctacagcaatgagcagttttatctctgcccggttgaaggaaaagagagcctctgtcacctctggctggatgtgcaggatgcatttaacaaagagggcgagctgacgctggaaatgcgggatgatgccggtgagatcctggcccgcagtgcattcaccctgctgaacctgaatgaaaaacgctcactgtttatcggcgcgctccagggcggcgtcagtgagcaggctcacaatgctatccgggcggcgactaaaaactgtcacggtgtattccctaaacgcattctgacggaagttatctgccttatcgcctcactgtttcagtgtcagcagattattgccaccagtaatgagacccatatttaccgcagccgccgttaccgccataaaaaactgacacaatgggtggccgattataattcgttctgggaatctgtcggtggcaccgccaatccgcagcacgaatatgtaataccgctgaccctgccgcgtaaacccattgatgaaatagccagtaaaaaacgtgccgaataccgccgccgttatcagttactggataatgtggcgcaggccgtctgtgaacgcctgcaactgccgcagccggaaaataaaacagatgttcaacataacattatttaagaaaaatccttcatttacagcaggtttgaccggtaattgacatttcattacagaacttattgatttcccgtaaaatataatctgcaaaaggctgaatttaatcttaatattgtttcggggctgcgggaaaaattcactgtctccgctacccctaatttgctaaagtggccggatttaccagtgtatatatcaggggttccggtcatatccgcagaaatgccccataacatgaaataagcttacttcagatccgggaataattgatggaaacaatgcagcaactttttttcgccctctggcatcaggactatgaaaccctgtcaaacccgtccctgctgtgggcgatttacattatgctgtttgccattctcttcctggaaaacggcctgcttcccgctgcgtttttacccggcgacagcctgctgattcttgtcggggtactgatcgccaaagatactctcgatttcccgacaaccctgattgtcctcaccgccggtgccagtctcggctgctgggtgggctatttacaggggcgctggctcagtaataccaaaatagtgaaaggctggctgtctcatctgccgccgcattaccatcagcgggcacacagtttattccaccgtcacggccttgcggcgctgttagtcggccgttttctggcgtttgtccgtaccctgctgccgatgctggcggggatcgccggtctgaattcacgccgttttcagttcttcaactggctgagcggcttcctgtgggtcggtattttaacgtctctcggttactgcctcggtatcagcccgattttccgaaaatatgagcatcatctgatgaatattctgatgctgatcccggtggtactgctggtctttggtttactcgccagcctgtgggtggtgtggaaacgcaagcggacaaaaacgtctgacgacactcacgcacaataaattaccagactatttttccggccggtgcaattacagcagccggccgggaaacattatctctctgtccgccgtttcagcgtcatttcctctgaattaccccgtcatcacccgcaatgtgcagaacaataccggaaaataaactataatttacctttaattgcagataaaaagcggttactttgaatctgttacgctataaccaccacgaggagttcctatgtcacatcatacaaatgaagagttacgcgctgaactgaaatcattggctgacaccctggaatctgtgctgaatacggcagaaagtaaatccaaagaagaagtggattcactgaagaaaaaagcacaggccgcgctggaaaattcccgtacccgtctcgcggaagggaaagagcaggttgtgcagcagacaaaagagatcgcaggcaaagccgataattatgtccgcgaaaatccgtggaccggagtcggtatcggtgccgctgtcggtgtggtgttaggtgttttactggcccgccgctgagttatgaccgatcaggagcgtccgcaggggcccggcaaagggctccttgatacactgacacgtatcgccgccatcgttatcagcatggcagaaacccggctcaggcttgtcgccactgagctggaggaagagaaatccaacctgatccagctgattctgctggccggtgccgctctgctgctgacagcattcggtctgatgagcctgatgattctggttatgtgggccgttgatcctgtgtaccgcctgaccgcggtgattatcatgacatctgttctgctcggcggggcactgattttcgccctgtgggccgtccgcaaagcccgccgttcatccctgctgggcgcaacccgcgaacagctggcgatcgacaggcaactgctggaaagaaaaaagcaggagcaggatcatgaataagcatctgcgtgctgaacgcgcccgcaaaaagcaggcactgattgacactatcgctgcccagcgcagcgatttgtcacaggccacggatcagtggctgaaaaaaaccgaatcatttgaccgcacctggcaaacattgtcacaactgcgtccgctggttgtcgccggtgtcagcctgttttccgtctttgctgtccgccatccgaaaaaacttatccgctggggacaacgcgccctgggactgtggggtgttttccgcacacttcagagcagtttcccccgtaacaggcagaactgacgtatcccgccccccggattcaaaatttttgatgttgtttattaagaattcttgctaacaatccttctcattcgcacttactattatcccaacgaaacggattggcatatcgtgccatttaaacaaaagaatatgtgactcaatcgtcatatttactattcagtattgttgagctaataaggatctaacaatgaacaactacgctattttagtcgcacgtatcatgatgcctgtcttatttattgtggccggatacggcaaattaggggatgcttatgcaggaactcagcaatatatgcaggcaatgggtgttccgggggcattgctgccgttaaccattctgcttgaactgggcggcgggctggccatcctgtttggtttcttaacccgcacaaccgcgattttcacctttggttttactgtgctgaccgccctgctgttccacagtaattttgcggaaggtgccaaccagttaatgtttatgaaaaactttaccattgcaggcggttatttactgctggctgttaccggcccgggtaaattcagtatcgattatttactgaaaaagaaatggtaattgcattcaggcaaagccacacagcaatataataaataatactattgtgaaacatccgctccggcggatgtttctgaacagatttatcaaaaatatgcatcattttttccgcataaccccggttcacaatataggcattggcacaatatgcatatttaaggctgagagaacaaatatccgcttcatgctcataaacgttgtaataatttccgcctaataatgcaacatcccactctcttttctgaagcgcggataaaaagagattagcctgcagaatatgttcatcatcgcaataaaaattgcagtcatcctcaacaaccagcaccggtccccagtcattttcagcgatcattttcatcacagcggcatgagaaagcgcacatcccagaaatcccggttttttcttaaccgcattaaagcggataattttatggtgggggatttaaatactttccagtgcttccataatatcgtttttgcgatccggccgggattcgagattgatataaatgactttttctataaagctatgatcgagtgcgaaattctcatccgacataaaccgcttcagatccacgttgcctcctgcaaatacactgatgacataccttttattgccggtgaatattcactgaatgctaacggatatatatcaccggtcaatcgctgttgttcttattattgattaacgcatttcccggcaaccggcctccggcacacaaaaaaatacctgccgcggataaccgggcaggtatctgatggtaagcgccaataattattttccactaaacaatttcggaatttcccgcagacaccaggctttggcctcacccatgctgtcgcggcgccacgccataatcacattggtttcatggctgtattcggagccgatcactttcaggcggccttcctgaatatctttttccaccagcgggtacggcatgctcgccacacccagtccggcaagcagggcacgacgtttatcatcaatagaactgaccgtcaggcgctgttgtttgtccagcagtaacaccgtcagtaccggacgttcgcgggcagtatccgccacggcaattccccggtatttcacccgggtggtatcggataacggctccggctctttgtggatcgggtgatccggtgccgccacatacacattcaccacagaatagagcgggcgggagttgatttcagaagaagtgcggaaatgcatatccggcgcaatcacgatatcggcacgcccggtttccagccgctcccaggcaccggcaagcacttcggtggccagagtcagctgagtggtggatttctgtgccagtttgtccaccagcgggaacagcgaggccgtcgggatcagcgcctcacagacgatggtcagatgcggctcccagcctcttgccagtgcttccgcatcactggtcagtttatccgccgcttccagcagcaggcggccgcgctccagcagcatccgcccgacattagtgaattttgtccggtgacccgagcggtcaaacagaacaacatccagctcttcttccagtttctgcatggtatagctcagggcggacggtacacgccccagttcttccgccgccgccgcaaaacttccccggcggtcgatggcatccatcacgcgcaatgattccagcgttaacgctttgtctttactcatcattatctcagtcagaaattttgaatgtcgccaccagattaactggctaacaattcagcgtccagccctttattatttcaccatgtagaataacaggcagaccattatgattatacacagaaccgccggacaggccgggtccgccgactatggctggttacaggcgaaatatgctttctctttcgggcactattttgaccccggatttatggggtacggcccgctgaaagcactgaatcaggaggtactggctcccggtgccggtttccagcccaaatcctatcccgatgtggatattgtaaacctgatcctcagagggaagcacgatattcgtgataatgacggactgtatctggagagcagacaggatgagtgtctgtttttctcaccgcgcagggatgtcagttacactgaaaccaatccctgtgagaaatcaccgctgacccggattcagatctggctgaaagctgcacgcggcagcctgcgcggcagttcacaaaaactgatgctgacacagcagccggtacagctgattgcctcgccggatggtgaagacggcagtcttgatttacagcagggggtgcggatttcccatatcctgcttcctgccggtgaatccctgacactgccgttgtacggtaaacgggcattctatcagtcggttcacggtacagtgacggcggatgacgggcagaaacaggggataattgaatgcggtgacggcgcgtttattcaggacagccgggaagtgacctttcaggcgaaaacgccctgccgggcactgcttattgatattctggcctgacacacggcctgaaatgaaacaaccccgcgtcagacgcggggttgtgatagtgaggagtcagccgttaagccgggttctgtcgtggacaatcattcctctgggccagcactcacgcactggctcaagcagcctacccgggttcagtgcgggccgcaccatatgaacccctatttggccttgctccgggtggagtttaccgtgccacggactgttaccagccgcgcggtgcgctcttaccgcaccctttcacccttacctgtgcccttacgggccatcggcggtttgctctctgttgcactggtcgtaggctcgcgcctcccagacgttatctggcaccctgccctgtggagcccggactttcctcccctttacccgtctcccggagggactacgataaagcagcgattgcctggctgactccgctgcggattataagcagctttcccgctgatgtacagaataactccgctccggaagagcggatggcggaaaaggcatcactctgcggcagaatccccgtccagggtgtaacggtaaagagcatttttcttcacgccgtacagttccgccaccaccgcagccgcttttttcggcggcagttctttctgcacaatcgccagtgcacgcagaatttccgggctgaattcctcatcctgcaccggcttagcaccttccgcaatcagtaccatctcccctttgcggcggttttcgtcttccttaatccaggccagcagttccacgaccggtttcccctgaatggattcccaggttttggtcagctcccgcgccagcaccacataacggtcttccccccagacggtgaccatatcggccagtgtatccagaatgcggtgggtggattcataaaaaatcagcgtgcgcggttcatcggccagcgtccgcagtgtgtcctgccggcttttggttttggccggcagaaatccctcgtaacaaaaacggtcagagggcagaccggcagcactcagcgcggtgacagccgcacaggcaccgggcagcgggatcacagtaagccccgcatcacgggcgcggcggaccagatggtaaccgggatcgttaattaaaggtgtacctgcatcggacactaatgcgatactgatcccggactgtaatttggtaattaattgatctgctttatactgttcattatgatcatgcagcgcaaacaaccggttattaataccgaagtgcgaaagtaataagccggtatgccgggtatcttccgctgcaatcagatcgacattcgtgagcacctcaagagcacgtgctgtgatgtcattcagattaccgatcggtgtcggcacaacataaagtgtcgctgccgcaaccacggcttgattaggttgattcattgtttcgtccagatgatcacattagaattgagctttcagaaaactataaccgggtacagtatgttttccttaactttatcgcgttaccgcaggcaattactttgtaccgcactcttttccacgctggttctctcaggctgtacacttgagaaccggcatgcgggcacagccggcaaaggccagccggaaacacaggttcagcaatatcagaagattattgatgcagccgccggaaagccgtccgttgacgcaatccgtgcttatatcgctcaggagccgctgctcactgatccggatgcacatcagcagaatattgatgaaacctggctgatgctaacacgttttacccccgaagagcgcaataacattcaggttaacgctgatgaaagcgtcttacagggctgggttgatctgcttattctgtatcagaacaaccagcaggatctgaaagcgctttccgccgcactgggtgactggcaaatccgttacccggataacccggccgccaaatccctgccgcaggaccttatccagaccctgagcagcacctacggccagaccggtaaaaatgcccgcgttgccctgttcctgccgctgagcggccaggcgaaactgatgggtgatgctatccgtcagggctttactgatgcacaaaacggcgcggtatacagtaccggttaccgggttgctgatattccggccgcacagccggtcagcgccgttccggcacagaccaccctcagcccggcagatccggataaagatatcaccgcaccggatgaagcaaacggtgcaccgtcaaatgacagcaccgcagacggcgcaaccgccgcaagtccggtatctgccccgcaggtactgccgtacagcggcgagtcccgcactgtcactgacgtgaaaatctatgataccgacagcaaaccgctggcaactctgctggcgcaggcacaggctgacggcatggacctgattgtcgggccgctgctcaaaggggatgtggccacactggcaaccgcaaacaccccgctgaacattctggcgctcaatgaattagatacaccaatcgcccgtccgaatgtctgctacttctcactttcaccggaagatgaagcccgcaacgccgcacagtttatccgtcaggataacaaaaccgcgccgctggtactgacaccggataacagcttcggccgccggatcgcacaaagctttgccgatgagtggcagaaaaatggtggtggtttggtactgcatcagaccttctccggcaatccgggcagttcactttcactgaccggcgtgccggtgcagccatcctcatcagcggcagcgcagccggacggtaccgtggtacagccgcagcctgtcagcggcggtgtggactctgtctatattatcgccacctctgatcagctgatttacatcaaaccggcgctggaatttgccaccagtgcgcgcggacgcccggcgttttatgccagctcccgcagcaataaagccggaaccggcaaagattttcagtttgaaatggaagggctgaaactgacagatatcccgctgattgcgggcggtaatccgcagttactgagtcaggcagccgggaaattcggcaacgactatacccgtgtccgcctctatgcgatgggcatggatgcatggcgtctggcgaatcagttcggtgatatgcagcgtcatactctgcgcatgaatggcgccagcggagacatcactgtcactgataactgcaccgtttaccgtcacctgccgtggctggagtttaagcagggtaatcttgccccgctgggtgccgcaaactagtctttgtctgaattttacaggtgacaggatgtcacctttatattgctgatatacagggaacgtatttatgcttacatggctgacaggccgtcgtcatgaacaatttgcccggcgctggctggaacagcagggactgacatttgttgcgcagaatgtccgtttccgccggggcgaaattgatttaattatgcgggacagcggcacctgggtgtttaccgaggtccgctaccgccgcaatgcacactatggcggagcggctgccagtgtcacaaaaaccaaacagcgccgcttactttatgcggcttcctgctggttatctcagcaacagctgagtatgctgacctgtgactgccgttttgacatttgcgccataaccggtgaccatatcgactggctgaaaaatgcctttggtcacgccgacttttgttaatgtcgttatccgttgctgatagcaggacttatacgtgttagacagaattaaacagtgttttactgaaagtattcagacgcagattgcagccgcagaagccctgccggatgctatttcccgggcggccatgatgatggttcagtcgctgctcaacggcaataaaatcctctgctgcggtaacggcgggtcggcggcgacagcttcgcgcttcgccaccagtatgatccaccggtttgaaaccgaacgcccgagcctgcccgcactggcactgaatacggataatgtggtgatgaccgcaatcgccgccaaccggcagcaggatgaaatttatgccaagcaggtccgcgccatcggccagaccggtgatgtgctgctggcgatatccacacacggcaacagccgcaatattatcaaagcggttgaagctgcggtgacccgtgatatgaccattgtggccctgaccggctacgacggcggggagctggctggtctgctgggtccgcgtgatgcggaaatccgcgtaccctcacagcacagtgtccgcatacaggaagtgcatatgctgacggtgaattgtttatgtgatttaatcgacaatacccttttcccccaccaggaagactaaggagatattatgagaattgtgcccgtggcagcactaatctgcagcgcgttactgttacagggatgtatcggcgcagcacttgtcggatctgcggcagttgcgaccaaagccgcatcagacccccgttctgtcggcacacaggtcgatgacggcacactggaagcccgtgtcagcggccagctcaataaagataaagatatcaaacagcagcggattattccggtggcttatcaggggaaagtcctgctgattggtcaggcggaagatctctctctggctcggcgggcaaaagagattgccgccaaagtggacggtaccgaactggtgtataacgaagtccgccagggaacaccgattgatttggggactgcctccaaagacgcctggattacgacaaaagtccgttccaagctgctgaccagtgatgcggtaaaatccgcgaatatcaaggtaatcactgaaaacggtgagattttcctgttaggggtggttacccgtcaggaaggggctgccgcggcgaaagtagccagtgaaacggatggcgcgaaaaaagtcaccaccgcctttacctggctgaattaattccgtctgctttcggaaaccgataagaaacctgacttaatgtcaggtttttttatgcccgtgccggatgcctgctttctgctcatccgcctgaatgcagataaaatgcaggatatatcaataaataacaaataataagaatattataccaaaacagtctgagctgcggtcattattatatttacttatcatttttgtaaaaaaacaaatcagtaagataaattcattatactgcggctaattatcagccagattatttttcttcaggaacgttgttccgcccagcaactgcatctgatgcaatatccattgctgacgctggcggagatacgcggaaggtttatccgcatgcaaccggtggggattcggcagcacggcagccagtaatgcagcctcagccgccgtcagatttttcgcgcttttgccgaaaaagtgctgcgccgccgcttcggcaccgaaaattcccggcccgaactccgcgatattgagatacaccgtcaggatccgtgactttgaccagaccagctcaataccgggcgtcagcagcgtttccagcccttttcgtacccagctgcggccatcccacagaaacaggttcttgaccgtctgctggctcagtgtggatgcaccgcgtgccgccctgcctttcttaccgctttttgacagtgcgtcggagatagcaccgaagtcaaaaccgtggtggtgcgggaaattctgatcctcagacgcaatcaccgccagcttcatctgcggggaaatagcgtcttcacccgcccatgtactgtgagcgacataagaaaaattgaatgttgaccatgccgaaagctgcctttccagcatcaccatagagtaagggacagggaggaacgcgaacaaaattatcattgttacccataacaacataacaaaaacaactatttttcgcagaaaccgcaatatcctccccatcattttcctcattctttatcaggccattccgagcactttcttcacgagtttatcaatcccgatctgtgcctgtgcgatattctcagccagcatataggctggggttgtcacgattttatgggtttcatctacgacgatattatccaccgtgcaattgacatgtacgccgcccatttccgcgatcgccgccgcaatatcagaatcattgccaatggtaagttgtactgatgaattaacgattttcgggatcatcaccggtgcaatacacataaatcccatcggtttgccctgagataacatcccacgcgtcaataataaaaaatatttatctatttcgcagtcagcaccttttacggcaaaatcgcacagattttttgccgcaccgaaaccgcccggaacaatcagtgcatccagctgtgacgcatccgcttcggccagcggacggatttctccgcgtgaaatccgtgctgactcttccagcatattgcgcttttctgatttttcctcaccggaaagatgattgataacagtgcgttgaggttcatccggtgcaaaaaaatacacctgtgcgccggattgggttaaactgagcaacgaaagaacggattcatggatttcactaccgtcgaaaacaccgcatccgcttaaaacgataccaacagatttcatatctgactccttttgtagtagattaatgcttaaccctttagaggtgcaaacaccaatcttcatcacagtttttaatgaatcttgtaacaaaaatacttatctttgctatgttgaagcctgtatgatgtaagagcctatttcatcactcgcctaaataacgataaatagttgtcgcgggtgaaccagtttccctggtgttggcgcagtattcgcgcaccccaacctcggttggggttattttttacctgcgatttgccagccagtttcttaaaattcccacctgactttcccaatcgtgattcagttcatcgacccactcctgcacgttatcgtcccatgccggtaattccggtgactgaatctgctgtgcaacctgccgcagatggataagcccgactgacccggcggcgcctttgattttatgtccctcttccgcaatgcctttgcggtctttcgccaccatgttggaattgaggatcgccagatagcccggcatcattttttcaaacacatccaggctgtcttcaatcagtttcggtcccaccagttcgatgtactgattcagcatctccagatccagtgactgcgcatacacgtcctcagacgccgctgagccgctttcctccgcaggcagtgcctcactaccgtctccccagaatttcgctatcatctgcgtcagagcgcccacagcgagaggtttgctcagcacgtcatccataccggcgtccagatactcttttttatccttcagcacattggcggtcagtgccaccagcggcggtaaatcatccgcctgataacgctgatgcagctcacgggcgatatccagtccgctcatatccggcagctgaatatccagcagcacaaggtcgtactcctccggcgagaacatcgccagcgcgtcacggccgttcatcgcgacatccaccgtattacccagtttttccaggacagagcgcgccaccaccacattcagctcgatatcttccaccagcaggatattcagggccggcagcagcagaccgtcatcgtcctcctcctccggagcctcctgggccggtgcgcagaccgacagcgtgaagcaggagcctttgcccggctcactggtcacggtgatatcaccgcccattgcctgtgccagacggcgggagaccgccaggccgataccggtaccggtggcagggcgtccgcccgcgctgtccgttacctggtaatacatggcgaagattttttccagctcatccttcggaatgccgataccggaatcccgcacctcaaagcagagcatatcattggcttcacgccacactttcaccgtgataccgccttcgcgggtgaacttcacgccgttgccgataagattccacaggatctggcgcagacgggtgccatccgccatgatcacagacggtaccggctggatcaggtcgagggtgaactgcagccctttcggctgcaccagcaggccggacaggttttccagatcagaaataaattcggtgaaattgaccggctgggtatcgaggcggacattacgccgctccagtttgtccatctcaatcacgtcattgaagatattgccgagggtgacggcgctgacatgaatggttttcaggtagttttcctgttccggattgagatccgtatccagcagaatgcggctcagcccgacaatcccgttcagtggcgtacgcagttcgtgactgatggtggagataaaggtggttttctcacggctggcgttttcaatcgcttcctgataacgcttgcgctcagtgatatcacgaccaaagcccatcaggccgtggcgtttgccgacactgtcatagaacggtactttgcgcagctcaaagcaggctttgcgtccgtccgggtagaccagccactgctcataggtgagcgaaacattatgacggaacactttttcatccgtttccatcaccttatcagcgatttccggttcataaatatcgcgcggggtcaggccgcgcagcagtttttcactgcggccggtaagcagttccatcgcgcggttacagccggaaaactcatttttctcattgcggtaatacaccaggtccggcgaagcatcaaggaaggagcgcagcaggacagattgctgttcaaattcgagctgggtctgttcgcggcggctgatctctttcttcagtttatccagcagaacaacctgttcatcctcaactttttcgcgctcggtaatctcctgattcagttgggtaatgttctctttcagctgttcattgagttcgagatcccgcttgcgcatcacttccagtttactgaccagtctggacaggcgctggcgggattcctccagctgttcaaccaccacagacataaaatagaccgcccacggcgtgatcagcaggccgaagaagacagagcgcaccaggtcaatgctctgtacttccccctgaagcagcatggtgacagcaatctgcaccaccatcgccagcaccaccagtcccgatgccagcaataacgaaaaccggaccaggcccagtttcatcagtaaatcaacataatattgtgctaaaccgcgtagcaatttcatacctgctccacccgctgaatgagggttagtatcataacgtaaaattggcggatcacagcgtttccggcgcggattaagtaaaaaatcaaatcagccggcgttacaggcatcctcagccggataatatggccggattaccacccggtactgtttttttatctgaataaaattaaaaacacgacatttatctgcaaattagcagaaacagagcagataaaatcaggttataaataaaaatgcccatgctgcgcggtaataacccgcaaaaaacagtgatgtacatcacacaaaaaatcggtactccggttgcggaaacagcggattaaaatcctgaaaatagttttttttcattaaattatcgcaaaaaccatgctcacatactgtcagttacctgatatttgaccgtcaccgtatttcccggtaagttgaaaaacgacgttccggatcacctgtggtcagcaccgatataataattattcgcttgccggtcgcggcacaaacacacatcacaataccctttgctgagatatctgtcgtcagcagggctgactgaggcccggaaacagctttgccgcagaaatgcggcctaatgtgagacatgcaaaaggggccacttatgctttataacccgtcacaggataaggacaactgcggtttcggcctgattgcccacctcgaaggacaacccagccacaaagtcgtgcgtactgccatcagcgggctggcgcggatgcagcaccgcggtgcgatcctcgccgacggcaaaaccggggacggctgcggtttgttattacaaaaacccgatcgcttctttcagatgattgctgcggagaatgaatggcggctggcgcgtaattatgcagtcgggatgctgtttctcagtcaggatccggtcattgcacaagcctgccgcgatattatcgaagaagagctggcggacgaaacactgtttatcgcaggctggcgtaaagtgccggtcagaccggagatcctcggcgaaatcgccctcgccggtatgccgcagattgagcaggtctttatcaatgctcccgcaggctggcgggcacgggatctggaacgccgcctgtttatggcgcgccgccggattgaaaagcgcatcagcgacccggatttttatgtctgcagcctgtccaatctggtgacgatttataaagggctgtgcatggccgccgatctgccgcgtttttatccggatctggccgatttaagaatggaatccgctatctgcctgtttcaccagcgtttttcaaccaataccgttccacgctggccgctggcacagcccttccgctatctcgcccataacggcgaaatcaacactatcaccggtaaccgcgagtgggcccgtgcccgtgcttataaattccgcacaccgctgatcccagatctcatcaccgccgccccgtttgttaatgaaaccggttcggattccagctcgctggataatatgctggaactgtttctcaacggcgggatggatctggtgcgtgccatgcggctgctggtgccgcctgcctggcagaatcacccggatatggatgatgatctgcgcgccttttttgattttaactccatgcatatggagccgtgggacggcccggccggaattgttatctctgacgggcgctatgccgcctgtaacctcgaccgcaacgggctgcgccctgcccgttatgtcattaccacagacaaactgatcacctgcgcctctgagatcggtatctgggattatcagccggatgaagtcactgaaaaaggccgtgtcgggccgggcgaactgctggtgattgatacacaggaaggccgtatcctgcatacccgcgagaccgataacgatctcaaaacccgtcatccgtacaaagcgtggctggagaaaaatgttgtgcggctcacgccgtatcaggatctgatgaataaaacaccgccgcagcgcgccttcggtgatgcacaactggcggtgtatcagaaacagttcgggtacaccctggaagagctggagcaggttctgcgggtgctgggggaaaacggccaggaagcggtaggctcaatgggggatgataccccgtttgcggtactctccgcccgcccgcgcctgatttatgactatttccgccagcagtttgcccaggtaaccaacccgccggtcgatccgctgcgggaagcccatgttatgtcgctcgccaccagcatcggccgggaaatgaatgtcttctgcgaagcggaaggccaggcacaccggctgagtatggcctcaccggtgctgatgcacacggatttcgaacaattactgagccgtgatccggattattaccgtgcagaacatctgtcactctgttttgatccgcgggaaaccacactggaacaggcgatccgcaccctgtgtgataatgcggaagccgctgtccgcgccggtactgtactggtggtactgagtgaccggcagatttccccggacaccctgccgatcccggcaccgatggcggtaggcgcggtacagcaacggctggtcagccagagcctgcgctgtgacgccaatatcatcgccgaaaccgccggtgcccgtgacccgcatcattttgctgtgctgctcggattcggtgccaccgccatttacccttatcttgcctgtgaatccctgctgaaactgtgcagtgataacgtcctcacgcactcaccggcacaggtattgctcaactaccgcaacggtatcaacaaaggactgtataaaatcatgtccaaaatggggatctctgctgtctcctcctaccgctgtgccaaactgtttgaagcagtcggcctgagtgattctgtggcagagctctgcttccggggtgtaccgaaccggatcggcggcgcggatttcagtgattttcagcaggatctgcataatctgtcccgcctcgcctggctgccgcgcaaaccgctcgatgcaggcggtctgctgaaatacattcataacagtgaatatcacgcctataacccggatgtgatcgcaacattacaaaaagcggttcacagcggacattatgcggattatcagcactatgctgctctggtaaacggccgtccggcggccatgctgcgcgatttgctggcactgcgcaccgatacacaacctatcagtattgatgaaactgaatcggcggaatccctgttttcccgctttgataccgccgccatgtctatcggtgccctcagcccggaagcccatgaggcactggctgtcgccatgaaccggctcggcggcagctccaattccggcgaaggcggagaagacccggcgcggttcggcacagaaaaaaactctaaaatcaaacaggtggcctccggccgctttggtgtgacaccggggtatctgcgcagtgcgcgggttatccagatcaaagtggcacagggcgcaaaacccggcgaaggcggccagttgccgggagataaagtcacgccgtatatcgcctcgctgcgctattcggtgcccggcgtcaccctgatttccccgccgccgcaccatgatatttactctatcgaagacctggcacagctgattttcgatctcaaacaggtcaatccggaagcactgatttccgtcaaactggtctctgaaccgggcgtcggcaccattgctaccggtgtggccaaagcctatgccgatttcatcaccatttcgggatatgacggcggcaccggcgccagtccgctcacctctgtcaaatacgcgggtaccccgtgggagctggggctggcagaagcccagcaggcactggtgagcaacggtctgcgccataaaatccgcttacagacagacggcggactgaaaaccggactggatatcatcaaagccgccattcttggtgcggagagctttggtttcggtaccggcccgatggtcgccctcggctgcaaatatctgcgcatctgccacctgaataactgcgccaccggcgtggcaacccaggatgaaacgctgcgccgcgatcactatcacggcctgccggagcgggtaatgaactatttccgctttattgcacaggaaacccgtgagctgatggcgcaactgggggtgagaaaactgaccgatcttatcggccgcactgatttgctggtcagaattgaaggcaccactgcccggcagcagaaactggatctgtccgatttactggtctctccggtaccgcatgaaggtgcggcactgttctgctctcaaactaacccgccgtttgataagggggaactgaaccgccgcatcctggaagatacccggacctgtgtgcagacacagcaatcccgtgccttttattatgatatccgcaataccgaccgctcagtgggggctgcgctctccggctttgtagcggagctgtacggcaacagcgggatcgccgcttcgccgctgaaactgcattttaccggcaccgccgggcagagtttcggggtctggaatgccgccgggattgaactgacgctcacgggcgatgccaacgactatgtcggtaaaggcatggcgggcgggcagattgttctgcatccgcatccgggttctgcctttgccgctcacgacaccacaattgccggaaatacctgtctgtatggtgccaccggcggcaaactctacgccgcaggccgtgccggagagcgctttgctgtccgtaactccggcgcactcgcggtggtcgaaggcgtcggtgataacggctgtgaatatatgaccggcgggattgtctgtgtgctcggcaaaaccggaattaacttcgcggccgggatgaccggcggattcgcttatctctatgatgaggacggcaccgccgccggacgtgtcaatcctgaaatggcggaaacccgcgatatcagcgggctgccggttctgcaggaacatttgcgcggcatgctggaagaccaccgccgcctgaccggttccgccagagcagacgcacttctcagagattggacagagcaggccgggcggtttatcctcgtcaagccgaaatctgcggatatttatgcacttgccggggtaacccgccacgcagacactgaattacggatccgggcacagtaaggggaatcaagatgagccgcaatgtttatcagtttattgaattacagcgtacggatccgcaaaagctgccgctggcactccgtaaaaccgaatttatcgagatttatgagccgttttcgccgccgcaggtgaaagagcaggcgacccgctgcctcggctgtggtaatccgtactgtgaatggaaatgcccggtacataactatatccccaactggctgcggctggcggaggaaggccggattattgaggccgcagagctgtcacaccagaccaacagcctgccggaagtgtgcggccgggtgtgtccgcaggatcggttgtgcgaaggtgcctgtaccctgcatgacgagtttggcgcggtcaccatcggcaatattgaacgttatatcaccgataaagcctttgagatgggctggaaaccggatctctccgctgtccgtccgaccggaagaaaggtcgcggtgattggcgccggtcctgccgggctggcctgtgccgatgtgctgatccgcaacggcgtaaccccggtggtgtttgataaacacccggaaatcggcgggcttctcaccttcggtattccgtcgtttaagctggaaaaatccattatgcagcgccgccgtgagctgttcacagagatgggtgtggagtttcagctgaataccgagatcggaaaagagatcacgctcagtgagttacagcagaattatgatgccgtctttattggtgcgggcacctatcagtcgatgggcggcgggctgaaaaatgaagatgccgccggggtgtacagcgccctgccgtatctgatcggcaatacccgtcaggtgatggggttgccggatgatgattccgctccgtttattgacctgaagaataaacgcgtcgtggtactcggcggcggagatacggcaatggattgcctgcggaccgccatccgtcagggtgctgcagaagtgacctgtgtgtaccgccgggatgaggagaacatgccgggctcgcgccgtgaggtgaaaaatgctaaagaggaaggggttaatttccgttttaactgtcagccatccgccattgaaaccgatgcaacgggtaacgcctgtggtgtccgcgtattaaccacccggttgggtgatgcggacagcagcggccgccgtcagattgaaacggatgataattccgcctttgttattgatgccgatgcggtcattatcgcgttcggtttccggccgcacgcgatgccgtggctggacgctctcagtgtcacacgggatcagcagggccggatcagcgccccggcacaggcaacttatccgtttgaaacctccgtcagcggtatttttgccggcggggatgtggtacgcggctcggatctggtggttaccgccattgccgaaggccgccgggcggcagaaagtattctcgattatctgcacgtatgagcagagtaattacctgatcatgctgccttaaatgcaaaaaagaccgctttcgcggtcttttttatttatcggtctgttacttcacgacacgtaagttcggacggccacgcggtggtttcggcggctccgggtcatccccgtcggtgctttcttccgccggttttaccggttcgtcgtggatcagggtgatgttatccactgccggagtcagaatatcttcttcttccgcagcctcataagccacttccggctcaaacatcatcccggcaccgttttcacgggcgtagaccgcaataatggcagccatcggcacatccacctggcgcggaacaccgccgaaacgggcattaaaaccgacccactcgttggtcattttcagattacccacagcgcgcggtgcaatattcaggacaatctgaccatcctgagcatactccatcggcacattcacaccaggggtgttcacatccaccaccagatggggtgtcagttcattatccagtaaccattcatagtgcgcccgcagcagataagggcggcgcggtgttaattcctgaatatccatcagcggttaaccccgtgactgtaaacgcatctcacgctcagcttccgtcagggaagccaggaaagagtcacgctcaaacacgcgctgcatgtagaactgcaggtgtttggtatcagaagacggacgtgcggacaggtcgatacccagtaccggcagacgccataacagcggagacagatagcagtccaccaggctgaattcttcattcatgaaatacgcgtattctttgaataccggcgagacagcaaccagctcttccgttaactgtttgcgggcctggttcgcttcctgggcagagcccttttcaattttattcatcagcgagtaccagtcctgctcgatgcggtgcatcatcacacggctctgcgcacgcatcaccgggtaaacaggcatcagcggcggatgcgggaaacgctcatcaaggtattccatgataatacgtgaatcatataaggtcagctcgcgatccacgagtgtcggtaccgtctggtatgggttcagatcgatcaggtcttgtggcagattgcctgcttcgacatgctcaatttcaaaacttacccctttttccgccagtacaatccgtacctggtggctgaaaatatcggtcgggccggagaacagagtcattaccgaacgtttgttggcagcgacagccatgaaaacctccaagtttatcaaaataaaggaatgaacagcgcactacgccattcctacctgtaatctctcactgaatccgggaaagaaaaccacagcgggccaatccgggcgcgcggcagtgtgttcaggggcgagaaaaatgtttgtgccagtttaccagattttgctcaacttagggtgagtcagggcaaaaaatcattcaaaaacactaaaaatgggggttaacagggacagattcatgaaataaacatgaaattacaggttatgtcgggataatttgcggcagttatacggttataaaaaaacccgccgatggcgggttttttgtattccaacgaaaccagtgattaacgtttggagaactgtggacggcgacgtgctttgcgcagacccacttttttacgttcaacttcacgtgcatcacgcgttacgaagcctgctttacgcagctcagaacgcagagattcgtcgtacgccatcagagcacgggtgataccgtgacggattgcgcctgcctgaccagagataccaccacctttaacagtaatgtacaggtccagtttttctaacatttcaaccagttccagcggctggcgaactaccatgcgtgctgtttcgcggccgaaatagttttcgaggctgcgttggttgatgacgatgttaccactacccggcttaataaagacacgagcggatgaacttttgcggcgaccagtgccgtagtattgattttcagccattgcctataatcccgattaaatgtccagaacttgcggttgctgtgccgcgtgattgtgctcgttacctgcgtaaactttcagtttacggtacattgcacgacccagagggcctttcggcaacatgcctttcacagcgatttcaataacgcgctcaggatggcgtgcgatcatctcttcgaaggtcgcttgcttaataccaccaacgtagccagtgtggcgatagtacactttgtctgtacgcttgttgccggttacagcaactttttctgcgttcagaacgatgatgtaatcaccggtgtcaacgtgaggagtatattccgctttgtgcttaccgcgcagacggcgggctaattcagttgcaaggcggcctaaagttttgccggttgcatcaacaacgaaccagtcgcgttgtacgctttctggtttagctgtaaaagttttcattaaagcttacccaataaataagttacatgttggtgaaccaatgttcagaaactgaggctcacacgacgcttgtccagtaaacctaccccttcgagcagaatcatctggcgctagttgcagtcttctttgggaaataaagaaaaccgctgtaacgtggggtcgcaagattatagagaagtccctgcaaaaaatcgaccccaaattaaaaaaatttccccgaaacccttttcaggggggcgcattataccagatgcggcagtttcaggtactcctcactttgcatttcctgcagccgggagaggcatctggcgaactcaaaggacaataactgcccctgatagagagaatccatcccgctctgcgcctgaataatcagttttacttttcgctcataaaactcatccaccagcgccagaaaacgccgcgccgcattctcattttccgtggtcagcaccggaacctcatacaaaagcacggtgtgatagattttcgacagcgcaatatagtcgagctggctgcgcgcatcctcacacagtgtccggaaagtcaccgccagcacaccatccgtttcccgcaccaccggcagctgacggtgattgatggtcagcgccgcctgaccggctttctgtccgccggtcagccgggagaacatgctgtccattgccgctgacgtttccgcatccgccggggtcagccacatatgggcctgagtcagcgtgcgcagacggtaatcaatccccgcatccacattcagcacatcacagtattttttgatctgatcaatggccggcagaaaccgggcgcgctgtaatccgttacggtacagatcatccggcgggatattggaggtcgccaccagcgcgataccgcgctgaaacagggcttccagcagagtgccgaggatcatggcatccgtgatatcggagacaaaaaattcatcgaaacagagaacatccgtttcctgtgcaaagccgtcggcaatgttctccagcggattttcatgtccctgaagcgccgtcagctcctcatgcacccgcagcataaagcggtggaaatgcagccgcagcttacgcggcccgggcaggctgtcataaaacagatccatcagccaggtcttgccgcgcccgaccccgccccacatataaataccctgcaccggcggacaactcaccggcgcgggggcttttttcagccagcggttcagggtgccgcgcagccctttttccggctcaggggagcatggtgtgcgcatcaggagcgcctgatgcatctctgtcagccggtcaacggtacgccgctgcacgtcgtccggcgcaaatccgctgccgttcagtgcctgctgatacaactcacgcggtgttgtgctcataaacggtaatcccttaatattatcagaggtttttattgagatttttatgatgtagcggcgggtattatacccggaaatccgggataatgccggaaagccttaccttcactattccccccggacagcaaatccggttatagtgacaacagattctaacgcgcatgatgcacttaaaggagtagccatgatttgggtatatgcactcatcggattagcagttggtttaatcattggtgcgctggccgttcgtctgggcagttctaagttcagagagcaggaagccatgaaacgggacctggaaaaaaacaaggccgaactggaagagtaccgcaaagagctggtcagccactttgcccgcagtgcagaactgctggataatatggcgaaagattaccgccagttatatcagcacatggcgaaaagttcatcagaacttatgccggaactgtccgcacaggataatccgttcagctaccgcctgacggaagctgaggccgataatgaccaggcgccggtaaaaatgccgccgcgtgattattcagacggctcatccggcctgttccgtcccgtcgaaaacaaagaaagctaatcattgaaaccgcaggcgactgcggttttttttcgcctgaattcagccgcttaatactgtccttcaaaccattccccgcactaatcttcagttcacgtaaagccttgtaaaggttgttttatttccgttgaatgaggaacttttacacacacatagagtcataggagtatctgcgtatgctgcggcttctcatgcctgcagattcagcttattaattgatgagacacaaaacgaatgatgaataaaaagaaaaaaaacctgctcagtgctgttgccatcagcctcgggttatccctcgcggcgctgcctgcggtatcaaatgcggccttaccggccaaaatggccaccggtgaatctctgccgagcctggcaccgatgctggaaaaagtgctgcccgctgtggtcagcgtggaagtttccggtaccgccgttgcccgccagcaggtgccggaagagtttaaattcttcttcggcccgaatatgccatcacagcaggaaagtgtccgcccgttccagggacagggttccggtgtcattattgatgcacagaaaggctatattctgaccaacaaccacgttattcagaatgcggataaaattcagatccagctcaatgacggccgcaaatatgacgcgaccttaatcggccgtgacccgcagaccgacattgccctgttacaggtgaaaaatgccccgaacctgaccgccatcaccctggcggattccgataaactgcgcgtcggtgatttcaccgttgctgtcgggaacccgtttggtctgggtcagaccgcgacctccgggattatatcagcattaggccgcagcggtctgaatgtggaagggctggaaaactttatccagaccgatgcctccatcaaccggggtaactccggcggtgcgctggtcaatctcaacggtgaactgatcggtatcaacaccgcgattctggcaccgggcggcggtaatatcgggatcggctttgctatcccgagtaacatggccaaagacctgacctcacagctgattgccaccggtgaagtcaaacgcggctccctcggcatccgcggtgctgaaatgaacgcagatatcgccaaggcaatgagtgtggaagctcagcgcggggcgtttgtcagtgaagtgatcccgaaatccgccgctgccaaagcggggattaagtccggtgacgtgctggtctcagttgacggcaaacgcgtcagcagctttgcggaactgagagccaaaatcggtaccaccgcaccgggtaaagaagtgaaaatcggtctgctgcgcaaaggcaaaccgctggaagtcagcgtgatcctggatgacagcgaaggccagaccaccaaagcggaaaacctgaccactctgcttcagggcgcaaccctgagcaacggcagtaataaagagggtaataaaggcgtgaatattgacgcggtacagaaagattctccggcggccatgtccggccttcagccgggagacctgattatcggcgtcaacaaccagcgtgtgatgaccattgttgaactgcgcaaaattatcgacggcaagccaagcgtgctggcactgaatattttacgcggcgacgacaatatttatctgctgctgaataatgccggccgctgatacatttttgctgtgaatacagaaaccgcgccgcgtaaaacggcgcggttttttatttcaggcagcacctgcctcataaaaatccacggcggaattcagaaccggttttaccaccccggcgcggatcagataatcgccgaaatcctccccgtccgtccgctcctgtgaccagcgtccgataagctcatcaagcaccgataaaatcaccgctgagctgatattttcgcggtacatgcgcgggatacgggtgccggtgcggttaccgccgagatgcagattatagcgatccggcgctttgccgaccaatcccacctccgacagcatggctcttccgcagccgttcgggcaaccggtgacccgcagaacaatctcttcatttcccacgccgtgcgaggacataattttctcaacctctgtgacaaactccggcagaaaccgctccgcttccgccattgccagcggacaggtcgggaatgacacacaagccattgagttttcccgcagcggtgtgacattgtcgctgataaggccgtgtgcccgcgcaagggattcgatacgggatttttccgcctccggaataccggcaataatcaggttttgattggcggttaaccggaaatctccccggtggattctggcgatttccgccacgccggttttcagcggtttgcccggcaaatcaatcagacgcccgttttcaataaacagcgtcagatgccagtggtcatcaatcccttttaaccagccgatctgatcaccacgcagggtaaattcatacgggcggatcggggaaaacgtgataccggcacgccgttcggtttcctgtttaaatgtgtcaacccccacccgctccagcgtgtatttggttttggcatttttgcgttccgtccggtttccccagtcgcgctgagtggtgacaatcgcctctgccaccgccagggtatctttcagcgggataaagccgaactcactggccagacggggaaaagtcgcggtatcaccgtgagtcatcgccaggccgccgcccaccagcacattaaaaccaatcagtttaccgttttcctcaatcgccacaaaattcatatcattagcgtgcagatcaacatcattcagcggcgggatcaccactgaggttttaaatttacgcggcagataggtttcacctaagatcggttcctcatcggttgccgccactttttctttatccagccagatttcagcataagcgcgggtgcgcggcagcagatgctcagagatttttttcgcccactcatacgcttcacggtgcaggccggactgaaccgggttcgaggtacagagcacattgcggttcacatcattggcggttgccagtgaatccagccccgcctcatgcagcatctgatgcgccggtttgacatcccctttcagaatgccgtggaactgaaaggtctgccggttggtgatccggatactgccgtacagcgtctgttctgcagcaaatttgtctattctcagccactgttccggtgtgatcacacctcccggcaaacggcagcgcagcatcatggcgtgacgcggctccagtttctgttctgtgcgttccgcccggatatccctgtcatcctgctgatacatgccgtgaaagcggatcagcaggaagttatccccttcaaatccgccggtcagaccatttttcagatcctctttgatggtgccgcgcagatagttgctgtcgcgcttcattctttcgctgtcgctcagtttgccttccacgattaaaggcccgttatatttatcgctcattaatagacatccctctggtaccggcgcgctgtgcgcagctcacttaaaaactcatcggctgattcatgatcccggttaccgtaccggctgatgatctccagtaatgcatcttcggtatcactggccatcaggcccgcattaccgcagacgtaaatatgtgcgccgtcctcaatccagcgccacacgtccgctccctgctcgcgcagtttgtcctgaacataggttttcgccggtttatcccgcgaccaggccagcgagatctgggtcagcacaccatcacgcacatagcgctgccattcggtctgatacagaaaatcctcggtaaaatgctgattgccgtagaaaagccagtttttaccggaggcaccgtcattttcccgttgctgcataaaggcacggaacggcgcaataccggtgcccgcaccgatcataatgaccggcacatccgggtcggcaggcagtcggaaattatcattagactcaatgaaaacccgcacatccccgccctcctgtatatgatcggcgagaaacccggaagccccgccggtccgtgcccggccatctgtgtcataacgcaccacgccgacggtcagatgaatttcatcgtccgcttctgcctgtgatgatgagatggaatagagtctcggggtcagcggccggagaatatcagcgaaagcctgcgctgaaggccgggaaggtgcctgacgcagcatttccgcgacaggtgttttctgcgcataatgcagcgcggcctgcttatcactgatcagcgcggataacgcatcatgctgcgataactgcgcatatttgctgaccgttcccccgttattctgtgtgagctccagatgccggatcagcgccccgcgcaatgtgcaggtgtgaccggacacggtaatctccgctgccgcatcggcatgcagcagactgataatctcatcggccagtgccggatcattctcaaaccagacgccgagggaatcgccgggctgataatgcaggccggaatcccctgcggaaatttcaatatgccgcacatctttcagggaattgcggccggtaattttctgattaacggagagagatgccgtcagcggtgcctctttgctgtaacggttttcagtaacagtggccgccggaacggtcgtctgctgcgggtttcccgcagaaactccccgcgctttcagcacctgtgtcagtgcatcagcccatgccgcagccgcaggctgatagtccacatcggcatcggttctcggcagaagtgccgttgcacccgccgccgccagttgagtatcaaaatcaattcccgcctgacaaaacttctcatatgacgaatcccccagcgaaaaaaccgcataaaccgcgccgctgagatccggccgttttgccgaatgcagatatttataaaacgccaccgcttcttccggtggttcaccatccccctgagtggatgtcacaataatgacaatcttctcccgggcgagctgtttatatttatattctccggcgtttaccaaattaaccgcgaatttttcactgagaaaacgcgtttttaattcttcacatacgcgacgtgcattaccggtttgtgacgcggaaataatggtaataatgtcactgtctgttgtatttgatgccgggagaatagctgtctgcacagacgtatttccccgtccccacaaataaccggataaccaggccagttgctgagaggtaaaatctgctgttactgtctgcaaagccgcaagctgctccgcagaaaccggaaatacctgttccggtaatatctgtgctgccatagtcctgtcactcccgcattgctcattgtggttattattccgttatttcccaggttatcgtattacggcttattgagaataagaaaataaagccataactcataactaaataatctgatatatcatgacgattattcattaatcgtatattttcggaattcacacttagacaaacaatgaattacacgtaaaaaataacgaatttctcacccttccttttaattgaaaaatgatcttcagcgggaatattattcatgtataacaaaaagacatttcaatataaaaagtaattctttcccggaatatattctctgacactaaatagataactactcatgacttcataacggaagaaaataatgtcgttatatcagcctcagaaaaaaaataaattaaaggtcattttgtccttactggcggcgctggcggtgataagcgcatttatttacagccagaaagcgcctgcaccacaggcaaccactgaaaaaccggtggtgatcgcttatcaggcgattatcgatcccggcaaaattgcacaggcaaaccacgcctatgaggccgccaccggtaaacagattatctggaaaaaattcgacagcggcgcggatgtgctgaccgccctggctgccggtgaggcggatatcgccaatatgggctccgcgccgtttactgttgccgccagccgcggactgccggtggaggttttttatatttccggcattcctgacaccgccgaggcactgattgtccgcaatgaccgtaatccgtcaggcggactggccggtaagaaaattgccgtaccttttacctccacggcccattacagcctgcttgcgacactggagaacctgaatattgatgaaaaatcggtacagctgattaatctgcggcctgctgagattgccgcagcatgggagagaggtgatattgatgcggcctatgtctgggaaccggccttaagtcagctgaaagcaaacggacagatcctgatttccggccgcgacgtacgggcatggggtaaaccaacctatgacctgtgggtcgcggacagcaaatttgctgcacagcatcctgatgtgctggcgcagtttgccgccgttactgatattgaggttcagtggtatcagcggaacaaaaatactattgcggactttcctgacatcacaggcaaaattgcacgactgaccggtgcccgcccggaagatgtaccaggcgtgatggcgggtagtgattatcccgttctgaaagaacagaaacagatcctgacgaccaccctggcagatgatatccacaataccgcgctgtttttacagcagcagggcagtattgattcggttaaagattcctatgccggaaatatcaatacggaggccgtcaccacagcggcggggaaataataatggcggatatcgtactggagaatattgatctggtttatcacggtcagccgcagacaaccttatccggtattaatttaaccattccggataacggtattaccgttattctcggcgcttccggctgcggaaaaacatcgctgctgaatattgttgccgggtttttaacgccctccggcggaaaaataacacggaacggaaacgaaattcagcatcccgcctctgacagagccgtggtatttcagaatgacgcactgatgccctggctgaatgtctatgaaaatatcgcactgggactgaaaattaaaaagctcggtaagcaggaagaaaaagcgattgtcgaagaaaacctgcaaaaagtcggattactgcatgctatcaccgacaatatctggtcactctccggcggaatgcgtcagcgggtcggtattgcacgggcactggctgtaaagtctgattttattctgatggatgaacccttcggtgcactcgatgccgccaaccgggaacagatgcaatccttaattctgacgctgtggcaaaaacagcagagtgccttttttattattactcatgatattgaagaggcactgttaatggccacaaagctgatattaatggcgccgtatcccggccggataatatccggagaagaacccccgttttataaacaatggtcgcagggacggcgtatccgtgagattaaatcggatccggcgtttattcatcaccgcgacacactgtcagacaaaataatggcgtatcagcgtggttaattaacggacacggagtgacatcaatggcagatataaccggaaataaacaaccccgccacagccgtttattactcagcactgtgagtttatccgtgctgattaccggctggtggctgatcaccgcatttcagtgggttaatccgctctatttacccgccccgtctcagataggacaccagtttctggcgttatccgaatccggttacatgaatgccacgctgtggcagcacctggcggccagcctggatcgcatgctcaaagcgctgcttctggcggttatcaccgggatcccgctgggggtactgatgggactgagttcacggatacgcggaatactggatccggtggttgaactgtaccgcccggttcccccgctcgcctatctgccgctgatcgttatctggttcgggatcggggaaaccaccaagatcctgctgatctggttagcgattctcgctccggtcctgatttcaacgatgcagggcattatggccgcgccgggaaaccggatccgcgccgtgcagtcactgggagcaaaccggcttcaggtactgagatatgtgatcctgccgtcagcactgccgcagatgctgaccgggatccggattggtctcggcgtgggctggtcaaccctggtggcggcagagctggtcgcggcacagcaggggctcgggtttatggtgcagtccgccgcgcagtttcttaacaccggtattgtcatcaccggtatcgcagtgattgccgtggtggcactcgccatcgaactggcattgcgtcatttgcagcaggcattagtgccgtggtacggcaaagaatcttaaccgacagagaggtaatgaatatgcatatcagacaattaacacccgctatcggcgcgcacgtcagcggcattgatcttaacctgacaccggatgccgccacgctggccgtattacaggatgccttactggaacatcaggtgctgtttttccgccagcagtatatcaaaccggaagctcagcgggactttgccgctgcgctgggagaactgcatatacatccggtttttccttcacataaaaatgtgcgggaactgattgtgctcgacagccacctgcttgatctgaaggataacgaactgtggcacactgatgtgacatttctggaaaaaccggccatgggctgtgtgttatccgcggtacaggttccccctttcggcggcgatactctgtgggccagcctgacccgggcttatgatgatttatcaccgccgttgcaggaatttttatccggcctgacggcggaacatgatatcagcctctcttttccggacagccgttttgcgcagaccggggaagccaaagccgcgctggaaaaagcccgccgcgatttcccgccgagacgtcatccgctggtcagaacccatccggtcaccggtaaaaaaggtttatttgtgaccgctggttttaccagccgtatctgtgaattaagcccggaagagagtgatacattgctgaccttcctgtttaaacacagcacacagccgaagtattttgtccgctggcactggcaggacggcgatgtggcggtctgggataaccgctgcacccagcatctcgccagttttgattacggcgattttcaccgcattatgcacagagcaacggtgatgggggataaacctgtttaaccggctgtaccgcatgagactgtcagtgaccggcggctgacagactcataaccgtcagtgataaataaccgtctgataccgcacctgtttatttgtaccacatcataaaataccgcaattacacacatataatttccccggattatgctattctgccggaagtatctgcttcccgtactcacaacaccggttaaggactatgtggtttaaattattgcgctccgtttttatgggacttctcgtggctgccctgcttctggtcagtgtcccgtctattcgcccgcaatttgtgacccagtggtttacccatctgtttaataatgacgaaccggtcagctacaacaaagcggtacgccgcgccgcgcctgccgtggtcaatgtttacagcagtaatatgggcagcctctcccagcagggtcccgaaatgacctccctcggttccggtgtgatcatgaatgatcagggttatatcctgactaaccagcacgtcattaaaaacgccgatcagatcctgatcgccctgcaatacggtaattacggccgcctgtatgaaggcatgctgatcggcgcggatgatctgaccgacctcgcggtgctgaaaatcaataccaccgataaactgccggtgatcccgatcaacccgaagcgtcagtctcatgtgggtgatgtggtgctggcgatcggcaacccgtttaatgtcgggcagacagttaaccagggcattatcagtgcaatgggccgtgtcgggctgagtccgacccgccgccagaattttctccagactgatgcctcgattatggccggtaactccggcggcgcactcgtcaataccgaaggcgagttagtcggcatcaataccatgtcttacgacagcaatgatccgtcacggatgagtgacagcatcgggctggcgatccccgcagagcttgccctgcgcattatgaataaactgataaaagacggccgtgtgatccgggggtatatcggcatcacctccaaagagctgccgccgatccggactaacaacagtgatatcaatcagataaccggtctgcgggtctttcaggttgcccgtgacggcccggcggataaaggcgggattcaggtcggggatatcatcaccagcgtcaataacaaaccgagcacctcaccactcgaaatgatggatcaggtggcggaactgagcccgggcagtgttgtgccggtcaccctgttacgcaatggtcagatgcggtctgtcgatgtgaccatcgaggagttcactccctcccccggcggacaggaataagacacaaaaaaagagcggatatccgctcttttctgtttatggcttacatcagagaattactccgctgaatgaatgcgttcgatatccgcacccaggccgcgtaatttctcttcaatatgctcataaccgcgatcgatatgataaatacgatcgacgattgtggtaccttccgcgatacaacccgccagcaccaggcttgccgatgcacgcaggtcggtcgccatcacctgagcaccggacagtttttccacgccgtggcacagcacagaattactctcgatttccgcgtgagcacccatacggatcagttccggaatgtgcataaagcggttttcaaagatggtttccgtgatcataccggagccttcagccaccagattcagcagactgaactgcgcctgcatgtctgtcgggaagcccggatgcggcgcggtacggaaagtgaccgctttaggacgctgccctttcatatcaaggcttatccagtcgtcaccggtttcgatttccgccccggcttcgcgcagcttggccagtaccgcatccagcgtatccggcttggcgttacggcacagaattttaccgcgtgaaactgccgctgcgatcaggaatgtcccggtttcaatacgatccggcacaacggtgtgagagccgccgccgaggcgttcaacaccttcaatcaccacgtggtcagtccctgcgccggtgattttggcacccagcgcattcaggaatgcagcggtgtcttcaatttccggttcacgggccgcgttttcgataacggttttgcctttcgccaggactgccgcacacataatcgtgatggtggcacccacgctgactttgtccatcacgatagtgttaccggtcaggcgaccgtccacttccgctttgacatacccttcatcgagggtgattttcgcccctaactgctctaaaccggtgatatgcaaatcaaccggacgggcaccgatagcacagccacccggcagagaaacctgaccgtgaccaaaacgggccaccagcggccccagcgcccagatagatgcgcgcatggttttgaccagatcataaggtgcacaatattcattaattgcagaggcatccacacgcagtgtggttcctttgcgctcaatttttgcacccaaccgcgttaacagcttcacagaggtgtcgatatcccgcagttccggcacattgtgtaattcaaccggttcttccgccagaattgcagcgaacaggataggcaatgctgcattttttgcccctgagatagtcacttcgccctgaagaacggaaggaccttttacccgaaatttatccatctgtagacactctcattatcattaattgctgccgcgttacttgtcactgcattgtcagccgccgcggttacagcccgctcagtttacgatcccgttcccactgagccggggtataggctttgatagacaacgcgtggatacggttatccgcaatatattccatcagcggcgcatacacggcctgctgctgtttaacgcggctcatgccgtcaaaaagatcgccgaccgcgatcacctgaaaatggctgccgtcaccggtcacaattgcgtcagtaagtgctaacttatccatcagcacctgtttgatttcattcgtatccataatttctcaaattggttatcagattgtgtgttataggcactatcgtaatcgaatatgccccgctcttaaaccattaaaaatgcctccggctgtggtgacacaaccggaggcagttaccttacggaaaataacggcaaatatgtatctgtcgcgccgttatttacattattttaaattcacgcgttctgactgaattcaaactcaacgccgtagagtgacatcagcatctgcaagttagcgcttactccggataacacaaacggcgcttccgggcgctctccccgcagacggaccagcatggccagcccggcagaatccacatgactgagaccggaaacatccaccgtctgcacggcgctcatctgctgctgacgtgcattccagaacgacagcagtgtatcgcgatccagttccccgttcagggcgagcgtttcaccctgtttttcccacgtcagcgcagccgtcattatttctgatccagggtaatcggggttttcgcgctgcgttccagctccgcagtcagaccatcaacccctttctgacgcagaatagatgcccactcattctgtttggtggtgatcatactcacgccttcggcaatcatgtcataagcctgccagttaccggttttggtatttttacgccactggaaatccagacggattggcggacgccctgccggctctgtcagtgtcacacggatagccacgatggttttatcacccagtggttgtgcaggatcaatctgataagtctggttagtgtacattgccagtgcctggccgtatgcctgtgccagataagcctcaaaggctttgaagtaagcatcacgctgtgccggcgtcgcatctttgtagtaagagcctaacaccagtgcaccggcgtatttgatctgcacatacggcagtaattcttcctgaacaacagtgcgcagatagtccgggttctgccggatttgcgcctgttcggctttcagacggctgaaggttttcgccgccgcatcgttcatcagtgtatacgggtttgtctggtcaacagctccggcaaacggggccatcaccaccagcatcgccgctatcagtaaacgcttaaacataatcaactcctgattaatcaccggcactttccgccgtgaaggtgtcttcggtaaacagtattatgcaggatgtctgcctctgcgggcaaaaacatccgtttttacattacttttcgtatcagtgctgtgcagccggtgccggggtattacccccttcgccgtcgccgctcttatacaggaactgaccgattaaatcttccagcaccatcgctggtttggtgtcctgaatacggctgccgtctttcagcatttcagtcatcggcagatccggatcggttgtattctcaaaccctttactgagcgccagatactgctcacccagcagaccggaggtgcggatagacaacgaactggtgtccggaatctggtcataccggctgtagatatccagcgtcacttccggtttatagtccttgtccagacggatgtcattgacgcggccaatcaccacaccgccgatttttaccggtgaacgtgcctgcaggccgccgatatcatcaaaggtggcagacacgcggtaggttttttcgctgccgacagagcggatatccgccactttcagtgccaggaagataatcgccgcaatggcaattaagacgaaaagcccgacccaaacttcatttttcttgctttgcattgtttaattcccgaacatcagtgccgtaagcacaaaatctaaccctaacacggcaagcgatgaatgaacgaccgtgcgtgttgttgcccgactaatcccttcagacgtcggaatagcatcatacccgttgtacagggcaatccaggtgacggtgaaggcgaaaaccacactcttgtaaatgcagttcatcacatctttctgccagtccacattggcctgcatggaagcccagtagaaaccttcatcgatccctttccagtccaccccgaccatgaccccgccaagaataccaacggcgacaaaaatcatggataacaacggcatactgatcaaaccggcccagaaacgcggtgcaatcacacggcgcagcggatccaccgccatcatttccaggctggataactgttctgtggctttcatcagcccgatttccgcggtcagcgcagaaccggcgcgtccggcaaacagcagtgcggtcaccaccggccccagttcacgcagcagcgacagcgccaccatcatgccaaggctggcttccgcactgaaggttttcagaaccagatatccctgtaaggccagaaccatcccgataaacagcccggatactgaaataatcagcagggactgcacaccgacgctgtacagctgcttgcgcagcaacggccactgccgggcaaactgcggtttgccgaacagcgcacggaacagcatgtatcctgaccgcccgaaagacgcacatgtcgctaacgcgcggcgtcccaaagcagcaagtgcctgtgtcaacatgtctcgtttatcctaataaatctgattggtaatcacccgccggatagcggaaaggaaccggtccgtcagcaataccatccaggaactggcgcacacgcggttcggtgttctcctgcaactcttctgcggtgccctgtgcaataacggactgctccgcgacgatataagccttatccgcaatactgagcacttccggcacatcgtgagagaccacgatgcaggttacacccagcgactgattgagttcatcaatcagttttaccagcacacccatggtaatcggatcctggccgacaaacggctcatcaaacaggataagatccggatccagagcaatggcccgcgccagtgccgcacgccgtgccatcccgccggagagttctgacggcatcaggtttgccgccccgcgtaaaccaaccgcttccagtttcatcatcacggttgtccggatcagggattccggcagacgggtatgctcgcgcagcgggaacgccacgttgtcatagactgtcatatccgtgaataatgcgccggactgaaacagcatgctcattttgcggcgcgactgatagagtctgctgcgggaaagtgccgggatattgtcgccgtcaaaccagatctcgccgctgtccgggcgtaactgcccgccaatcaggcgtaacagtgtggttttcccgatcccggacggccccataatcgcggtcactttgccgcgcggcacatccaggctgatatcattaaacagcatgcgcgaaccgcgccggaagcacatgttccggatctcaataatattttccgtctgtcggttcatgacctcacaaccttaacgttatgttttttgtgtttctgcaacacatacaggactgacccatcataatataaaaaaatccggcagttttcgcctttaaatgcgggtgttactgtctgaattatttatcacccctgagtaacggggtataaacagcgtgatacacaagtatatcagcatttaacattaacgctcccgccgggcgcaaaacgtctgttttacttttgcgcctcagcccgtacaataccctcaatttcccgtacttcattatttctgactgtttttcagcccggaggagagccatgttactcaccagcatccttttactgaccgggttgattctgctggtttatgcctctgaccggattgtgtacggcgcggcggttttctcccgttctctcggcatctccccgtttatcaccggtattcttgtggccggtcccggtacgtcgctgccggaactgctgacctccgccggtgcggtgcttgaagggcagccggatctggcgctcggcaccattatcggatccaatattaccaatttactgctgattgcaggcctcgccgcccttatccgcccgctgagtgtgcagtcggcggtgctgcgccgtgagcttccgctgatgctggccgtaatggcgctgttcgggctgtttatctggtccggcggtatcacgcgggttcagggcgggtttctggtgcttgcggggctcgccagtctctggctggtggtgaaaattgccgcaatggcgcggcgtgatcagtatgacggcttcactactgaacaaaaccatgaactgccgcaggaaaataatttgccggttgctttattgtggctggtcgccgggttgctgattatgccggtggcggtccggattgtgatcgataacgcctctgcattcacccgctatgcggagatcagcgggcgtatcaccggactgactatcctggctgtcggtaccagtctgccggaactgtgcaccacgattgcggcggcggtcaaaggtgaaaaagatatcgcgctggggaatcttatcggcgcgacactgtttaataccacggtcgttgcggggatcccggcgttattagccaccgcgccgatggcagcagacagttttatgaccgatttcgccgtgatgatcgcggccggtgtgttatttattttctttgcggccggccggaaccagcggctaaaccggctgaaaggcattattctgctcagtgcgttcaccgcctggctgataagcctttttaccggctgataagcgtcagccattaatacacagacagatactgaaagtgagaaaaaactgatgtcccgaactgattttcaactaacaggtaaacgtgtcctccggattgaacgtgaaggtctcgcgtcactcgaacagtatattaatgatgatttcgataaagcctgtgaactgatattccgctgtgaaggcaaagtgatcatcatggggatgggaaaatccggtcatatcggccacaaaatggccgcgacatttgccagcaccggtaccccttccttctttgtgcatccgggtgaagccgcacacggcgacctggggatggtcacaaagaaagatgtggttatcgcaatttcaaactccggtgaatcctcagaaattcaggcgctgatcccggttatcaaacgtcagaacatcccgcttatctgcatgaccggcaacccggacagtactatgggaaaagcagcggatattcatctgtgtattaaagtcccgcaggaagcctgcccgctcggccttgcgccgaccaccagcaccaccgccacactggtgatgggtgacgcgctggcgattgccttattacaggcgcgcggctttaccgctgaagattttgccctctcacatccgggcggcgcgctcggccgcaaactgctgttactggtttccgacctgatgaacaccggggatgatatcccgcgtgtgccgaaaaccgcctcactgcgcgaagcactggtggaaatcacccgtaaaaaactgggtatgacggttatctgtgacgatgacatgattattcagggcattttcactgacggtgacctgcgccggattttcgatgcgggcacagacctcaataactgccagattgccgatgtgatgaccccgggcgggatccgcatcaaagccaataccctggcggttgaggcactgaatttaatgcagtcccgtcatatcacctctttattagtcacagaaggtgataaactgctcggcgtactgcatatgcatgatctgctccaggccggagtggtgtaaggactgacgatgacacaaattaccactattgacacctgctatggcccgatagcgcaaacagttatggaaaaagccgctaaaatacggcttcttatctgtgatgtggacggcgtgatgtctgacggcctgatttatcagggcaacagcggtgaagaactgaaagcatttaatgtccgtgacggctacggtatccgctgcctgctgacctccggagtggaggtggcgataattaccggtcgtaaagccaaattactggaagatcgtgccaatacactcggaattacacatctttaccagggacagagcgataagcttttggcgtatcgcgaactattagataaactggtacttcgccccggcgaagtcgcctatatcggcgatgacctgattgactggccggtcatggcagaggtcggtttatccgccgcagtggcggatgcccacccgttattgttacccaaagcggattatgttacacagattgcaggcggccgcggggctgtccgcgaattgtgcgatctgattctgctggcacaaaataagctggatgcggccagaggcctgtccgtctgaagagaatttcattggttataatggctttatcagggatctcatgagtaaatttaagctttggctgatcattattctggcgcttatcgccctcggtctgctcggctggaacctgtcggtcacccgttcaggtgacaccgacggtaagattgtggaagacggtacgccgacgtataaaacccaaacgtcctcaaccctggcttacgagccgacagggctgctggcgtaccggctgaatgcggatgatgtgcagaactttgctcaggaaaaaataacctggtttactaatccggtgctgaccacctacgaccctgataaaaccgccacctggacgattcgtgcaaagcgggccaaattaaccaatgacagaatgttatatttatacggtgatgtgcaggttgacagcctgaccaccgatacacagctcaggcagatcaccacggataacgccgaagtcaatctgacaacccaggatgtgagttctgacgataaagtcaccatcacgggaacaggactgcgttccgtcggattgcagatgcggggtaatttacgcaatcgtaatgcggaactgatcaaagatgtacagacttactatgagatcccaaatgaaagcaaacatccttaatactctgattgcaacagcaattctggccgtcagtgtccctgctttggcgttaaaagaagatacacagcagccggtgacggtaacatcattaaaacaagcccttgatttagaaaaaaatatcaccacatttactgacaatgtcgtggtaaaacagggaacaattgatgtccgcgctgacaaagtggtggtcacccgtccgggcggcgattccaataaaatggtgatcgaagcattcggtaatccggtgaccttctaccagatgcaggataacggtaagccaatcaaaggacgcggcagcaaactgcgttacgaaatggccaatgaactggtcacgctgaccggtaatgcctatctggaacagctggacagcaatatcaccggtgacaagattacctacgtggtgccgacacagcagatgcaggcattcagtgacaaaggcaaacaggtgactaccgtactgctgccgtcacaacttcaggaaaaaggcccggcggcaaccggccagaaaggtaagtaacgatttatggcaaaattaactgcaagcaaattagccaaagcctacaaagggcgcaaagtcgtcgaagatgtgacgcttgaagtcagctccggcgaaatcgtcgggctgctcggcccgaacggtgccgggaaaaccacgaccttctatatggtcgtgggtattgttccccgtgatgccggtgcgataagcatcgatgatgaagatatctccctgctgccgctgcatgaacgtgcccgcaaagggattggctatctgcctcaggaagcctctattttccgtcgtctgacggtatggcagaacctgatggcggtgcttgaaatccgcaaagatctgaacaatgatgaacgccgggagcgggcggaagagctgatggaagagttccatatcagccatctgcgcgataacctggggcaatcactgtccgggggtgaacgccgccgtgtggaaattgcccgcgcgctggccgccaacccgaaattcatcctgctggatgaaccgtttgccggtgttgacccgatttctgttattgatattaaaaagattattcagcacctccgtgattacgggctcggcgtcctgatcactgaccacaacgtccgcgaaacactggatgtctgtgaacgggcttatattgtcagccagggccatatgattgcccacggcagcccggaatccattctgaataatgagcaggttaaacgtgtttatttaggcgaaggtttccgcctgtaatgccgtaaggagcccgtgtccgtaatgaagcagagtctgcagcttaaactcagccagcaactggcgatgacgccacaacttcagcaggctatccgtttgttgcagctttccacgcttgaactccagcaggagatccgcgaggcgctggaatctaacccgttgctggaacttgatgataaccatcaggaaattgacacgccggctgaatctgaaccacagaaagagctggacagcgccgaggctctcgaacagaccgccatgccggatgatctgccgctggatgcacagtgggaagaaatctacaccgccggtacaccgtccggcaccggcaatgattacggcgacgatgaactgccgctctatcagggtgaaaccaccgaaaccttacaggattatctgatctggcaggcccgcctgaccccctttaccgaaaccgatgccgcgattgccttctcaatcattgatgcgattgatgaaaccggctatctgaccgtttctgtcgatgatatccgcctgagtatcggtgacgatgaagtcaccaccgaagatgtggaagccgtactcaagcgcatccagcgttttgatccggtgggtgtgggcgcccgcgacctgcgggagtgtctgatggtgcagctgaaaattctgccgccggaaaccccgagcctgaaagaagcccttgctatcgttgatcagcatctggcattgttggggaaccgggatttccggaccctgggccgggtgaccaaactgaaagaagaggcgctgaaatccgctattgatctgatccagtcgctggaaccgcgtccgggcctggtagtcaacaccggagaatcagagtatgttattcctgacgtcctcgtgaaaaaacacggcgaacgctgggtagtggaactcaattccgacagcattccccgtctgcgggtcaataatcactatgccgcaatgggttcgcgggcccgcagtgagagcgacagtcagtttatccgcaacaatttgcaggaagcaaagtggctcattaaaagtctggaaagccggaacgatactctgctcagagtcgcgacctgtattgtggaagagcagcaggcgttctttgaacagggcgaagaatatatgaagcccatggtgctggctgatatcgcactgcgggttgagatgcatgaatcaaccatttcccgggtgacaacacagaaatttctgcacagtccgcgggggatctttgaactgaagtactttttctccagccacgtcagtactgacagcgggggcgaggcgtcctccacagccatccgtgcactggtgaaaaaactggttgcagccgagaatccggcgaaaccgctcagcgacagcaaactgaccgatatgcttgccgaacagggcattcaggtcgccagacgtactgtcgcgaaatatcgtgagtcgttatccatcccgccctcaaatcagcgtaaacagctgatttgatacacattgagaaggaagacactatggaattacaaattaccggccacaacgttgaaattacagacgcattacgtgagactgtgacagccaagtgtaagaaactggagcagtttttcgataaaattaacagcgttcaggtgatcctgcggattgaaaaggtgagtaaaattgcggaggcaacggctcaggtaaacggtgcggatcttcacgcctcagcggaaaaagaggatatgtacgcggcaattgatgagatggcagaaaaactcggccgtcagttgtccaaacacaaagaaaaactgagaaaccggtaaattttctgcacccgggtgcatgactgaattaacagtctgaattttctcaggaaaaagcagtgctctgatcccggttaccatggtggttgccgggattctgatcctaagtgaacaatgaaatgaataacgaagcaaatttgtccctgagcgatgtactgagtatcagctgtacacgcaataatattcactgtaccagtaagaagcgcgcgctggagattatcagtgaactggctgccaccgcgctggcgctgccggaaaacacgctgtttgaggcactccttacacgggaaaaagtcgggacaaccggtatcggtggcgggattgccatcccccacggaaaactggacaaaagcgaggcgcaaaccgcctgcggcgtatttttacacctggagcaacctatcgcgtttgatgcgattgataatcagaatgtggacattctgtttgcgttatttgttccgtctgatcagtgtcagacgcatttacacacactgtcgttagtggccaaaaaactggctgacaaagcgctctgccgccggttgcgtcaggcgcaaagcgatgaagagctgtacagtatcatcactgagtgatgataaccggctgacgacaacggataatggcgtattgccattgaaagagaaacgatagggagtcccctcatggtgctgatgattgtcagcggccgctctggttcgggtaaatctgttgccctgcgggcgctggaagatatgggtttctactgcgttgataacctgccggtcactcttctgccggagcttgccgctaccctggcaacacgcgatacctctgccgcagtgagtattgacgtccgcaatatgccggagtctccggaggtgtttgaggaagccctgaccagattaccggacagtttctcaccccagctgctgttcctggatgcggatcgcaacaccctgatccgccgttacagtgatacccgccgtctgcatcctctttccagtaaaaatctctcgctggaaagcgccattgatgaggaaagcgatctgctggagccgctgcgctcccgtgcggatctgattatcgatacctctgaaatgtcagtgcatgaactggcagaaatgctgagaacccgtctgctcggcaagcgcgaacgcgagctgaccatggtgttcgaatcgttcgggtttaaacacggcattccgattgacgcggattatgtgtttgatgtccgcttcctgccgaacccgcactgggatccgaaactgcgtccgatgaccggtctggataaaccggtggcggcgttcctcgaccgccatacggaagtacataactttatttaccagacccgcagttatctggaactgtggctgccgatgctggaaaccaacaaccgcagctacctgaccgttgctatcggctgtaccggcggcaaacaccgttctgtctatgtggcggagcagctggcggattacttccgctcacgcggaaaaaacgtgcagtcgcgccaccggacactggaaaaacggaaataatccatgactatccgctgtcaggttgaaatcaaaaaccggctgggattgcatgcccggccggccatgaaactgtttgaactgatccagaccttccggtcagcggtggtattccgtaataagcaaaatgaggaagcccgggcagacagtgtgctcgccatgctgatgctggattccgaacagggcagttttattgaagtggaagcaacaggacctgatgaaaattctgccattgaggcaattatttccctttttgattcaggttttgatgaagattagttatactaaccgaaatattttacttaaagaaaactgatacgctgtttcgttcacgcagcccggcggttcgtgatcctgatctctttcctttcggaggagaacagcctactatcagattaattatcaaatgagcacccccctccttctggtgtgggggtgttcttttgtattggaaatgatttggagtgtggtatgaaaaagcccaatataattattaatgaactggacgcggagcgtctggatatgctgctggaacagccggcttatgctgacagtccggttgccgaagccctgaatgaagagttggatcgcgcggaaatcctgccgccggcagaaatgcctgccacggtcgtgacgatgaacagccgcatccgctttgaagatttatcgagcgggaaagagagtatccgtaccctggtgtacccggcttcactgaaagacagtgctgaacagctgtctgtgatggcaccactgggagctgcgttactcgggctttctgtcggtgatgagatctcatgggaactgccgaacggtgaagcaacgcgcgtaaaagtatcagaaattatctatcagcctgaagctgccggtgagttacaccgttaatccgctttaagccggttctgcgtccgtttcaggcaatctgcgggcgcagcttcctcaggggttcctttcttcacacctttattgcatgatgtttctctctttatttcctgaaggaaactgatcatggctgcctattctttgacatctttgtttggtatgagcggagctccgggcggatttccggtcattctgggttttgaacagcagctgttattactgtggcggggctttatgctgctggcagtctgaatatcatccgtacagcacaattcaataacgcaagttaatcatgccgcagcggcttcttccgctgcggcatttttatttccgccccgcccttcacggatgattatcacaaaaaattattgcgcatagtaatcattatcaatatcattccgtttttattttggctgtttattcttctgatattgagactcacacatgaaatctgctgcgcatttacgcagaccgcattgctgttcccggtttgtgctgacattcccctttatctttatttctgtttttcatgcggttgccgccgatgatactctggttgtcactgccgccccgcaagaccgcgaagggagttacagcggggataatgtctattccactctgaaaacactgaccccgcgtaatgaaacgccgcaatccatcagtattgtcacgccgcagttgatccgtgactttaatgtcacttcagtggatgacgcagtaaagtttgtcagcggtgtaactcagggcaacacgctgggcggcattgaggacgggtttgtcaaacgcggcttcggctccaatacggacggatctgtgtttatcgacggggtacgcagcaaccaggggctggcgatggatgccactactgaacgtgttgatgttctgaaaggctcttcttccctgctttacggtattctgaatccgggcggcgtgataaacctgatctccaaaaaaccacagtatcagtggcagggacgcatcagcggacggacaaacagcaacggcggcggtaccggtacgattgatgtgaccggccctctcggcaatggcgtggcagtccggctgatagcagaacgccgccatgaagattactggcgcaatttcggggaagatcagcacacgttgctggcaccttccctgagctggctcggtgacagcgcctcgttcaatgtggcttataccgaaaataaattcgatgtgccttacgatcgcggaaccgcttttatcggcggcagcccgatccgtattccttataatgaacggatagatgacaacgctaatcacgcatacgggaaaaataaacgtctgaccgcagaataccggcaggaatttgacggcatctgggaaaccggaattaagtatgcgtggatgcagcgccgctacgacagtaatgaggtccgcgcgacggctatcaacccggagaccggaattgttacccgccgtgctgatgccaaccgtggctttaatcatcagaccacctatatcggctgggatatcagcggtacaccggaactcgccggtatgcggcatgacatcacgctcggggctgattacgaaaagaacgaaacctacaaagcctggtccttccgcggcaagccgtcaaaacaattcaatatgtaccatccggtatacggcgaatcaccggtcaccacagataaaaccgccgatgacgcaaaaagcaacctgcgcgccacggtgtacagcagttcactctatgccaaagacagtatccatctgaatgaccagtggattgtcgtgctcggaggccgtctgcagcgctatacgcaaaatggcagcagcggatggataaaccatcagacaacactcaatgacagcggttctgaatttgttccgcaggccggggtcgtctacaaactcacaccggaactggcactttacagcagttacagccaatccttcaccccttccgcacaggtggatgatgacggcaatgtggcctccactgaaaaaggtcagacatacgaactgggtgcaaaatggcagacaacaccaacgatgctgacgacctttgccctttaccgtattgatgaaaaagacatgtccatctttatgaacggcctgaaccggaatatcccgaaatcccgctcggaaggtgcggaactggaaattaacggcgaatttgcgccgggatggcagatagcggcaaactacagcctcaacagaacgcagattaaagaagataatctgaaaccccagaatgtcggtaaccagctggtcaatgccccgcgcaatatgggcagcctgtatctgacgcataccctgactgtaccgggcttaccgggtgaactgcgcttcggcggcggcggacgctatgtcggcaaacgtgccggtgatccggaaaacagtttttacctgccggcgtataccgtcacagatgctttcgccgcgtggaacgggactgtcagcggacatgagacccaactgaaactgaatgtgaacaatctgctgaacagggaatactatgcgtccagcgcgggaaacctgcgtgtcatcgccggagagccgcgcaccctgttcctgaatgcctcagtggacttctgatatgaaacatctcttttccgggctgctgctgatggcattttcgctgctgtgcggggcaaaaaccgttacggacagtctcgggcggacagtcacggttccggatgatccgcagcggatagtactcggtgaaagcaggatgctctataccctggcactgatcgaaaccggtaatccggcggcgcgtgtcgtcgggtggccggctgatttacagcgactcgattcgcagacatggggaaaatatgcggctgcatttccggcgatcagggatattaccattgtcgggaacgataatttttcacagcttaatattgagaaaatcatcgccctgcaaccggatctgattattatgccggtgtatgccaaatcccgtcctgatgaaacgcaatttgcacaccagaccgcagccgccggtattccggtgatttacctggatttcagggtggatccgttgcggaacacggttccgtcactgaaaacgctgggcgaagttctgaaccggcaggaaaaaactgccgcttttactgcgttttatcagcagcatatggacgtgatccgcaaccgtctggctatgcacaatccgcatcgccccaaagttttgctgcagttacatctcgggaaaaaagcagaatgctgcacgactgcagcttccggaaatctggccgatttactggccttttccggcggggataacattgcagcagggaagttcagtggtgttttcggacggctcagcccggagaaggtattgtcggataatccggaatattatctggtgaccggcagcggcggaagggataaccgggggcagttacaactggggccggatctccgccctgacaccgcccgacaaagcctgcaggaacaattacagaaagatccggtgattgccgcactgcctgctgtccgggaaggacggaccgccgcactctggcatcatgtttatctcagcccgtggcatctgctggcagcggagtttttcgcgcgggaactgcacccggatctcttttctgatgttgatccgcagaagacactggatgaaatgaaccggcggttcctgtctgtaccggaaaccgggacttactggctgttttcgcgataatcgctgctgttttctgcattttcactcccggaggcggatactccggctccgggagtgacacacttactgtcccgcaatactcatttccggcagccagactgagccgcactgaatgttgctgcgggtttcaatatcgtcgccggtggcgataatgctggcccacatgtctttcaggtttccggcaatggtgatttcactgaccggatactgaatctcgccgttttccacccagaaaccggatgcgccgcgggagtaatcaccggtaataccgctgacaccctgtcccatcagttcggtaaccaccagaccggtgcccatttcccggagcatgtcgtcaaatcccagcccctgaccggcaatgtgccagttgtggatcccgcctgcatggccggtgctcttcagccccagtttacgggcagcgtaggtggtaatcagccagttgttcagcacaccgttttcgataatcaggcgatcttctgtccggaccccttcgctgtcaaacggggtggaggccagtccgccgatcacatgcggcagttcgcggatagtcagccagtccggcaggatctgtttaccgaggctatcgagcaggaaggtggatttgcggtacacggaggtgccgctgatcgcgccgaccagatgcccgaacaaaccggttgccacttccggggcaaaaatcaccggtgctttctgtgttgccagtttgcgcggagcaaggcgggacagtgtccggcgggcacactcttcacccacccactgtgcggatttcaggtcatccagtttacgtgcgatggtataggcgtaatcacgctccatatcgccgttttcttccgcgatcacacaagcggacatggagtgacggctgctgcagtagctttgcagcatacccagcgtgttaccgaacacacggatgccgtaatggctgttaaagctgccgccttctgtgttggtgatgcgcgggtcggcactcagtgcggctttttccgcattggcggcatagtcgatagcctggtcagcgctcacttcggacggataaaacagttgtaaatccggtgcctcaaaagccagcaaatcgcgatctgccgggcccgaacacgggtcttcagatgtatatttcgcaatgtcgatcgccgcctgtacggtacgggcaatcgcctcttcgcttaaatctgtggaggatgcgctgcctttgcgctggttatgatacacagtgatccccagtgcgccgtcgctgttaaactcgacattctccacctcacccatacgggtgctcacactcatcccggtggttctgctgacagcaacttcggcgctgtcacaccctttctgtgcaatactcagtgcctgcgaaaccgcttgttccaggcgcgtacgctgcgccataatctgagaagtgatattcatcaatcaggttccaattcaataaattaaggggccgtcagctaatcagacagctgaataggtgttatccggccttttccccggttacaatacgcaataatcaaatgttaacactcacaaacacagagatcatccggcacccgccgctctgtgtttcgccacaggaaatactattatggcaaagcagcctgaagactggtttgaagaacccgatgcacttcctcaggaggaagaggatgacgagataatctgggtcagcaaaagcgaaattaaacgcgatgctgaagtcctgaaaaaactcggcgctgaactggttgcactgagcaaaacccagctggaacgtattccgctggatgaacaactgctcgaagccatcctgcttgcacaaaaaatcaagcgcgaaggtctgcgccgtcagttacagctcatcggtaaactgctgcgggcccgtgacccggagccgattaccacggcactcgacaaactgaaaaaccgccataaccagcaggttgtcctgctgcataaactcgaagatctgcgcgaacgcctggtcaccggtgatgacactgtgacggaagaagccgttgcgctgttcccgcaccttgatcgccagcagctgcgtgcgcttatccgtaacgcgaaaaaagagcgcgaaggcaataaaccgccgaaagcttaccgccagctgttccagtatctgaaagaactggcagaaagcgcttaatccgccgtcatggtcaggggggtcagcaccagctgaatatcccccggccactcttcctccgcatcccggcaggtaccgataatggctgaaaacagccgccgctgccgtgcggtaatatgttcaaacgccagtatcaccggcagatctattccgcctgtcagcatgtcccatagtgcatccgtgttacacccgaagtacggcagctgaaatttatcactgaattgctgataaaaatcgtctgttgtccggatggtgcggaaatcaaaacgcacaatgctgatatcaggtgtcatgggttaattggcctgctgaaacgaacggtaatgatcagtggtgacataaatcagcccgtcactggaataaagcagacgatcactgccgcgatggccgcagttatagtttatgtccgcctcaaaccactggcgtgatggcgcatccggcagccctttttcccggttgccgaaacggtcaccgccgatagctttacccggcatcacctcacagagattaccttttgacggctgccagcccgcatcacgggcggcttttttcgtcacatagtaatccggcagacgctggtgctgctgcacatagctgaccacccgtgactgtgctgtcagggcatcaatgctctgcggctgttctgtatgctgcggtaccggctctgacggacgggtttcgataaactgccccggtaaccccgccagccaggcggagaccgccacaatcagaacaatcaccagcgtgccgtatttctgcatcatcaggccgttccgccgacggtaatgctgtccagtttcagcgtcggctgaccgacacccaccggcacgctctggccttctttaccgcagacaccgacacctttatccagtttcaggtcattaccgaccatcgatacctgctgcatggcttcgataccggagccaatcagtgtcgcgcctttcaccggtctggtaattttaccgtcttcaatgagatacgcttcggatgtcgagaacacaaacttaccggaggtgatatccacctgaccgccaccgaaattcggagcatacaggccatttttcacactggcgataatctcttccggcgacgtttcgccggccagcatataggtgttggtcatgcgcggcatcggcagatgggcataggattcacggcggccgttaccggtcgggtcaacccccatcagacgggcgttgagtttatcctgcatataacctttcagaataccgttctcgatcaggatgttatactgtccaggcaccccttcatcatcaattgccagtgacccgcggcgatcaccgatagtaccgtcatcaacaatggtacagagtgatgatgtgacctgctgaccgatttttccgctgaataccgaagcaccacggcggttgaaatctccttccaggccatgaccgaccgcttcatgcagtaacacgcccggccagcccgcgcccagcacaaccggcattaacccggccggtgccgcaacagcagagagattcaccagcgccatgcgcaccgcttcgcgggcaaaatggtctgcgcggatctcaccgtcttccgtaccgaggaaatattcataaccgaaacgaccgccgccgccgctgccgccgtgttcgcgtttaccgtcctcttccaccagcacactgacagacaggcgcaccagcggacggatatccgtcgccagtgtgccgtcagtggcagctaccagcacttcttcatagacaccggtcaggctggcattcacttcctgcactcgcggatcttccgcacgggccacacggtcaaggcggtgcagcagcgcgattttttcctcacgcggcattgcgcgcagcggatcgagtgcagcatagagtgccgtgttattgacacggtgcaggctctgcaccttaccgttaccctgctcacggacaatactgcgggcggcggatgcactctgctgtaatgcggtcagacttatctgatccgcataggcaaagccggttttctcgccgctgacagcgcggatcccgacaccctggtcaatattgtaagagccgtttttgataattttatcttccagcacccaggcttcatgaaaactgctctggaagtacagatcgccataatcaatatggcgatccgctaactgtgtgaggacagaaaagagatcctgttcatcaagatcatgggcggtcagcagatgattgctgacagttgaaaaactcataatttactctttacctgtggtgtttttctcaatcagtgaagtcagctgcgggcggaaacggttatgtttcaccacgcggatctgctcacgcattgaggttaagctgtccggacggatatccacgccgatggcggccaccgcatccgtatttttcttcatcactttgccccagccgtcaacggccatggtgtgtccccatgtgcggcgggtaccgtgtacaccgacctgtgccggtgccaggataatgcactggttttcaatcgcacgggcgcgcagcagcggctcccagtgagatttgccggtcagccgggtaaaggccgccggaacagagataatctcagcgccctgctcacgcagtgcctgaaacaggcccgggaaacgcagatcataacagatggtcataccgagacgacccaccggggtatccaccacggtgatgtgctcgccgcgctggaagatttttgattcattgtatgaaccctgctcatcatcgatattcacgtcaaacatgtgaattttatcgtaacgggctttgatttcccctttatcatcaaacagcaggctgctgctggtgatacgcgccgggtcttcacggctgatcatcggcattgagccgaccaggatccacaccccgtagcggcgcgccatatcagccaccgctgactgcagcgggccttcgccctgcacttccgcatacttctgataggtgttgcctgatgcaaaaatcagcgcattttccggtgtcatcaccagcttgatattatcaggcagttgtttgatctgttgttcgatttgcgccaaattgtgtttaatatttgtgccgctgcacagctgcaataaagccacatttgcgtttttcattcccgggtctcctttaactgacgcaaaacttcatctatcttcggctcttctaaactgccgctcaggtgataccgtatcaccgaaattttactccagagcgggccgagcaccttactggccacaaagactgccgctccggctatcgggttaaccacaaaggctgtcgccaccccgaccgtcgcagagagttccggtgtgacaaccaccgacatatcaatacgacgctccacaagataaactgaaccgctaaagctgatatccgccattaatccgtccacgcgggtatcggttgtctttaaaataccatcttttatcacgcctttaccgcgtatgctgtcaaaaacgaagtcattactgaaagtatccgtgaaatcgagctgtaatttgcgcagtaatgcatcaaaactgacgagccgcagcagtttaccggcattaccgccgcccatccgttcaatcgcccctttgccgagcgacgtgctgataataccgttcagggttgccacatccggcgaccagggaacatcccgccagctcaggtcaaaatccacattgaacggtgagccggtgataggcaccagtaccccgaaataggcggccatattatcaaagaccggccccttaaactgacctttaaagtgcgacaatggctccggaccggcatcccagcggccgctgagtgtcagttcactggcactgtttttgacggttgccgcatccagcaccagagagttattttccggccagactttcgcattcaccgtaccgatattcaggccgctcacccagcaggcttcacagcgcagtgtgaccgcaggccagctgccgacgcggtaatccgttttggtggtttgattacgctgcgattccggcagcgcattctgaatcgactccggattatagtagagataatcaatacttgcctgccacggtccggaagccggaatgcggatatccccgcgcagctcctgactgtccgaactgagcagccagccgttttcctgcggatgaatacgcagtttcacctgattccagcgctgtccggcaaaatccgcatacggggcggaaatatcaatatttcccggcagtttcagtgaggcaggctgctggtgattctgaccggcaacggccagcgcaccgacccactcctcaccgctgatcggcggcagggcaatactgataacatccggcgtgactttctctggcacttttgtgcccggaacgattgccgcaccattaagcgtgagaatatcgccgagccgccagtccgtcaggacgctgaacgatttgccgacggttcccccggctttcagggtgtgttctgtcccggtggcatgcacattcagtgtgccgctctccgccgcccagcgccggacagccggtaaggtgctgctggtcagtttgccggtctgaccttccagatccacggtgtagctcatttcccctttctgcggcagggcaatgttcaccacccctgtccacgggaacgaaccggttacgtgctgttttatggccgccggtatgccgtcgatgcccttcatctgccagttaccgtccagatcgatattgacggcaaaatcagacgggttttctttagtggtaaagcggatattcagcggctgaccgaaccagtgcgccgtgatgcggtcactttccaggtcgccgttatcaaagcggaattgtccgctgacacctttgagtgtgctgccgagcggcaccacatcaatatcattatttttcagattaacatgcccggtcgcccgcaccatctcattgaagttaagcgggatttccagtttaagatcacccttaacctcaccaccgattttcagctgctccagggtattgccgatagagcttttcatcggtgtctgatcaaaatatttacccagtgattcgcctttgccttcaatatcagactgaatatagaggcgctcaaccatgaaatccggaatatccgctttcagattgcgggcggtggcctcgcccagttttgcttcctgtgcactgatccacagaccctggttatggaagttcagatccgcatccatgtttatcagggcaggccattcctgatcatatttaaaggtggcgtcacgcagcggtacccaaatctggaactgcccttcgtttttgcggaacgggaagtctgccgggttaccctgaaatatcaccgtggcattttccgctttcccggcaatcagtgcctgtgtcaggtattcgctcaggaattcccccatcagcggtaccgggaaatagcgccaggcttccccggcatccgtcagggtcacgccgccgaggatcccgagagacggcggccggtccttatcatgctgatagcggaagttgccattcgcccgcagcgcgccggattgcagatctaaattatcactccagaggctgaagttgccgtccgtattattccactgcacctgtccgcggctttctgataccgccaacggtgcggtaaacatcgggcggtagtccagcacactgtcatcgagggcaaaacgcagaatgccgcgtgcctgtccgccgcgtaatacgccgctgaaatgagataccgacggtaattcctcccgtgctttccagctgacatcctgccaggaaacatccagttcgaggttttccggggcggccggggtgatatcaagggcaaaatcgcggataagacctgacggctcgcgctcctgccaggctttaacaatatcattggtgaggaaagagaacgtcggcacaatgctgctcagacgcgccagctcaatatcattggcgcggatacgcagatgcggattgccgccgtatttggccgacggcgggatataaagcagtgacagactgccctccggccactgctgcccgtcagttttcagattcagcagatccgggatattaaacagccagccttccccctggcggcgcatctgcaccagaagatcctgaacttccagggtgtgcgtgtccttgccgaccagccagtccgcctcgccggagttcagtctgaccaggccccgggttatcgtccctttctccaccgtcatccagccggccaggctgaaaccggccttgttcagcccggtgttatcacgcagccagcggctgaaccacggcgtcatatcaatatcatccgcctggaggtagaccgttccctcatccagcagaccgttcacatcccgcagatccagacgcacctgcagccagccgcgcgggttattcaccgaggagagactgatctccccctgagcgcggtggcgtttgctctgattgagccatgacagacgggaaaccagcaaagtggcaggatcgccggacggtgtgagaaaacggatttcactgtcgcgcagatcaaaattatcaaagcgctccagccagagaccggacatcgcatcatcggtttcaatactgctgccgtcactgctcagcggctgtttgtaatccagcttcatgtgccagaatgtcagatcacggaaactgacctgaaaacggaataacgtccgccagatatccagggataggtcgattttttcggctgaaatgtccgcgtccggagcggtaacagtcaggtcacggagtgtcagcgccgggccgaatccctgccagcggccgctgatttcaccgattctgaccgtggcaccggtcatttgtgagagtttttgttcgatctgcgggcggtattcattaatctgaggcaacagatagcgcagaccgccgagcaccagtgctgcagcaatcaccatcacaatcacacatgtcagtaaaatcccgggcagtcgcctcactggctctccttctcctgcagctgtcaaggccggcggaaccggatatccgcttatatccggcagtataccgccaatgaattacatcatgacgacatcaaaatgttcctggctgtagagcggttcggcgcgaacctgaacctgtttaccgacaaaaatctccacctctgccagggcatgggattcatccccctgcaatgcctcagtcactgccggtgaggcatagacgaggaagcgatcaacatccagcagatggtgcacgcggacaatctcgcgcagaatttcatagcagaccgtttccaccgagcggacactgccgcgcccctgacaggtcgggcatttctcgcacaggacatgttcgaggctctcccgcgtgcgtttgcgggtcatctccaccagtccgagctgtgaaaaaccgttgatagtggtcttcacgcgatctttggccagcgccagttccagcgaactcagcacccggcgacggtgatcctcatcggtcatatcaatgaaatcaatgataatgataccaccgaggttgcgcagacgtaactgccgcgcaatcgcctgggtggcctcgatattggtattgaaaatagtttcttccagattgcggtgcccgacaaacgcaccggtgttgatatcgatggtggtcatcgcctccgtctggtcgataatcaggtatccgcctgatttcatttcgaccttgcgctccatcgcccgctggatttcattttcggtatcatagagatcaaaaatcggctgactgccctggtacagttccagtttggcggtcatttccgggatgtaatcatccacaaattcctgtaactctttaaagctcaggcgggagtcaatccggatgcggtcgagtgactcaccggcaaaatcccgcagaatgcggtgtgccagcgccagttcaccgtagattttggtacgggtggtattgcgttttttgcgctggataactttggtccacaaccggcgcaggaacgcggcatcagaagtcagttcttcttccccgaccccttccgctgctgtgcggataataaaaccgccgtcctcatcacaataacccgccacaatgtttttcaggcgctcgcgctcttcttcgctctcaatgcgctgggaaacccctacgtgagaggcgcccggcataaacaccaggtagcgggacggcagcgtgatatcggtggtcagacgcgcacctttggtgcccagcggatctttgaccacctgcacaataatatcctgcccctgatggaccagttccccgatatcgcgggtgcggaatttctctttttcatccccggaaatacattccgtgtgcggcataatatccgaggcatgcagaaaggctgctttatccaggccaatatcgataaaggccgcctgcataccgggcagcacccggctcacacgccctttatagatattgccgacgataccgcgtttagcctcgcgctcaatatgaatttcctgcaggatcccgccggtaatataagcgacccgtgtttcagacggggtcacgttgactaaaagctcggctgtcatggtatttctttcccgtcaatatgttccggtacaaccccgttcaaggtatccgtgtaccgtttaattaattcttcggtctccactaacggtaatcccaccacagcatgatagctaccgttaattttacggacatagcgtccgcccaggccctggatgccgtaagcaccggctttgtccatcggctcacctgtctgaatatactcgtttatttcgtcatctgataaccggcggaatgtcacatccgtcacaatcagtgtgctcagtgtccggaaacggtcagaaaccgcgaccgccgtcatcacctgatgtgtgcagccggatagtgcactgagcatggtaaaggcatgtgccgcatcactgggcttctccaggatatcaccaccgagcaccacaatggtatcagagccgataaccggcctctcttccgctgccagcgccaccccggcctgtgctttctcccgcgccaggcgctccacgtaatccgcagcgggttcaccgtcacggcggatttcatcgatacagggggagagtgtttcacactgaacattcagcagccggataagttcccggcggcggggagaggttgaagcaaggtaaatcggcagcattcaggggtcctgacgttttgttaacgtatcacgccgccgttccctgattaatgaacagaaaagtgacggcgggtcttacgcagtaataaaaaaatccatggccataagataccattgaccagactgttccagaagacttccggatgaaacacaatatcggacaataaaaattctgaccagaaaacaaagaactgcatcagcactgacagcaccataatgaccagcgactgctgccacagcgccatattgcgcagcagctgatgtctgaatgagaccagataggtgacgatagacaggctcagggcatgcacgccgagcgtggaaccttcaatcaggtcaatgatcatgccgagaaagaaagcggagccgacactgacccggtgcggcagcgccatcacccagtagataagaaacagcatcgcccacgacggacggtaaaactgaatctgctccggccagggcatgatttgcaataccagtgctatcagaaaggagagccagacaataatccggttttgtccccggtaggtattcattgttgcggcctcatcctcagcggccgggccggtgcggaatcagcagccggatcctgagcggccggtgcggcagtggccggtgtgtctgccggttttggctgtgcaggcttcggcccggccggtttcggcggagtcgtaccggcggaaggtgccggagcggcaggtgcgtccggggctgccgcagccgggtcagtttccggcgtctgaacagacgggatcacctgcggcataacctgcatgatacgttcgttggccgcgcggtacacctcagacgggccggaaggctcacgcgggttgctgtctccgccccataataagagcagataacgcagacgctgaaggtcagccgtcggtttggcactgataatggtataagcgcgctgattatccacttttaccgaagagacaatcccgaccgggtaaccttccgggaaacggccgccgaggccggaggtgaccagcacatcccccacgcggatatcaatattgttcggcagtggttcaagctgtaaatcgtcagtacatccggtgccggatgcaatgacgcgaatgtcgttacgcagcacctgaatcggcagtgcgtgggtggtatcgcagatcagcagaacacggctggttaactgagacacggcaatcacctgtcccaccacgcctttatcactgatcaccggctggccgtcatacacgccgtcacggctgcctttgtcgatcaccacctggtcacggtacggggtgttggctcccgccatcacctgagtgaccatcatgtgctcatcctgacgcagcggtgaaccgagcagttcacgcagccgggcattttcctgcttaaattgttcaagcagctgattctgactgcttttaaccagcaattcctggcgcagagcgcggttttcaaattccagctgctcgcgggtggcaaagttatcagagataccgtccagtaactgacgcgggccgttggctaaaaaatagaacgggctgaccgccgtatccagatagttacggattttggtaaaagcatcaatccggttatcaaccacaatcagtccgatggcaaaaataaccgcaacaacaatgcgaatctgaagggaaggcccccggctaaaaatcggcttcataggatgcgatatcaggcactacagtaattccgtccgggaagacagagtgtgtatccggcgagctgggggagcggactcccccggcctgcagtattgaacggacgggagtccgcttattcttcactgagaagatcgctgccgtgcatgtcgatcatctcaagtgctttgccgccgccgcgggcgacacaggtcagcggatcttccgcgacgatcaccggaatcccggtttcttccatcagcaggcgatccaggttacgcagcagagcgccgccaccggtcagcaccattccgcgttcggagatatcggatgccagctccggcggacactgttccagcgccagcatgacagcactgacaataccggtcagcggctcctggagagcttccagaatttcgttggagttcagggtgaaaccgcgcggaaccccttcagccaggttacggccgcggacttcaatctcaagcacttcgtcagtcgggtaagccgaaccgatttcgtgtttgatgcgttctgcggttgcttcaccaatcagtgaaccatagttacggcgcacatagttaatgatagcttcgtcgaaacggtcgccgccgatgcggacagaggaggaataaaccacaccgttcagggagataaccgccacttcggtagtaccgccgccgatatccaccaccatggaaccggtcgcttctgataccggtaaaccggcaccgatagccgccgaaaccggctcttcaatcagataaacttcacgtgcaccggcgctgagcgcggattcacggatggcacggcgttcaacctgggttgcaccgaccggcacacacaccagaacacgcgggctcgggcgcataaaactgttactgtgaacctgtttgataaaatgctggagcattttctcggtcacaaaaaagtcagcgataacaccgtctttcatcggacggattgctgcgatattgccgggggtacgacccagcatgcgtttggcctcatgaccaacagcagcaacacttttggttgaacccggacgatcctggcggatagccacgacagacggttcatccagaacaatgccttgtcctttgacataaatcagggtattggctgtacccaggtcaatcgacaggtcgttggaaaacatgccacgaatttttttaaacatacaaaaggataatcctgcaagccggggacggggaaaaacccgtctactttaccaaccacgtttctttgcgacaagccacagattgcaccttgccaacagcgtgtccacatcacatcagggagcggtctattctagataatttttatatactgcgcagtataaagctgcataaaaacgcagactttttcacatatttgaggaaatacgcgcaggcagattaaaattaatgtaaaaaatccggcagttgccctcttttttcattaattcctgcaaacttccgaacagttgacctgtaactatgcatcaagttcaaccggattctatataatatacgcaatcttacaatcggcctgacgcccgctacctctatcttcgcattaaaaccatccgcttaatcacagataagacggcaaaaataccgggttattcaccggattatgatgaatcagcagcaccctttactcagaataatctcaaaataacctgaaatataaatatccgtatcccggatacagacccgttatatcccgttctgtccgtattcagcgccataatatttccgggacttgccaatctgccggtgcggatgcactataacgcaccacaacggcagacaactattcacaacggcttattcctgcgctgttcatcttacgtaagatccgcctccggaatgccggttatgtgagcacaccggcagaaaagcatcctgacctccgggcgtacctgttaaaagaccggcaggcagactactatcagcaaacggatacaggatgcagacagataatacgtatgattaactggtcagccttgtgccggttccggtctgttcagaccagtattttgctgcgaactgcaatgaaatgtttataatgtcgcccttcctccgtaataattaatattaccggtggtgagaaaaaggtgacaacacattaacatcgcgttatcttgtgcgtttacgttagattgcaggagatggcagcaggatgaccgaaagttatcatatattgttactgaacggcccgaatcttaacctgctgggcacgcgggaacccgataaatacgggacgctcactctcgcggatatcgttacaacgctgacccgcgatgccggtcagtgtggcgttacactaagccacctgcaatccaacgccgagcacgaactcatcgacagaattcatgctgcacggggaaacaccgattttattctgataaacccggccgcattcactcacaccagtgtggctctgcgtgatgccctgctggccgtcagcatcccgtttatcgagatccatctgtcgaatgtacacgcacgggagccgttccgtcaccactcttatctttctgatatcgccaccggcgttatctgcgggctgggtgcggaaggctaccgttatgctttacaggcagcggttcaccgtctgtcacaattaactcaacactaagagtacggaatcatctcatggatattcgtaaaataaaaaaactgatcgagctggtcgaagagtccggtatttctgagctggaaatttctgaaggcgaagagtcagtacgcatcagccgcgctttaccggttcaggctatggccgtaccacagcaatacagcgcacctgttcagcagcctgccctggcagccgctgttgcaccatccgcaggtcttgctgatccggcgccggaaaaagagattgccggccatgtggtccgctctccgatggtgggtacgttctaccgttcaccaagcccggatgcgaaagcctttattgaagtcggtaaacaggtcaatgtcggtgacaccctgtgcatcgtcgaagccatgaaaatgatgaaccagatcgaagctgacaaagccggtgtggttaaagcaattctgttaaaagacggcgatgctgtcgaatttgacgagccactggtcgtcatcgaataacggggcgaatcatgctggaaaaaatccttattgccaaccggggtgaaattgcactgcggatcctgcgggcctgtaaagagctcgggatcaaagcggttgctgttcactcttctgcggatcgtgatttaaaacacgttctgctggctgacgagaccatctgcatcggtccggcagcctctgcgaaaagttatctgaatatcccggccattatctctgctgctgaaatttccggcgcacaggccatccacccggggtacggattcttatctgaaaacgctgattttgccgagcaggttgaacgctccggcttcgcttttatcggcccgaaagctgaaaccatccgcctgatgggcgacaaagtttctgctatccgcgcgatgaaagaaaccggtgttccgtgtgtgccgggctctgacggcccgctcagcgacgatatgccgctgaaccacaccattgccaaacgtatcggtttcccggtcatcatcaaagcctccggcggcggcggcggacgcggtatgcgcgttgtccgcaatgatgaagatctggaagaagcgattgcaatgaccaaagccgaagccaaagcggctttcaacaacgacatggtttacatggaaaaattccttgagaacccgcgtcacgttgaaatccaggttatggcggatggtcagggccatgctgtttatctggcggaacgcgactgctccatgcagcgccgtcaccagaaagtggtggaagaagcccctgcaccgggtatcactccggcgctgcgcaaaagcatcggcgaacgctgtgccaaagcctgtatcgatatcggctaccgtggtgccggtacctttgagttcctgtttgaaaacggcgagttctatttcatcgaaatgaacacccgtattcaggtagagcacccggttactgaaatgatcaccggtgttgacctgatcaaagagcagctgcgtgtcgcatccggcctgccgctctctgtgaaacaggaagatatcaaagtaaaaggtcacgcgatcgaatgccgtatcaatgccgaagatccgcacaccttcttaccgagcccgggcaaaattacccgcttccactctccgggtggtttcggtgtccgctgggagtctcatatttacgccggttatactgtaccgccgtattatgattcaatgatcggtaagctcatcacctatggtgaaacccgcgaaattgctatcgcccgtatgaagaatgcgctggcggaactgattatcgacggtatcaaaaccaatatcgagctgcaccagctgattatgaatgatgagaacttctgtaaaggcggcaccaacatccattatctggagaagaaactcggcctgcacgaggtctgattttctgtcgcttttctttctcaggcccctgtcaaacaggggcttttttataaagagctttttataaagagtatgttatgccctggatccaaatacgattaaattccaccggtgctgatgccgaagttatcggtgatgaactgactgaaaccggtgcggtctccgttacctttcaggacagccacgacaccccgatttttgaaccgctgccgggggaaacccgcctgtggggcgacaccgacgtgatcggcctgtatgacgctgaaacggacatgaaagccgttgttgcgcaattacagcagcacccgctgctcggcgaaaactttgtccataagatcgaacagattgaagacaaagactgggaacgcgagtggatggataacttccacccgatgcgtttcggtcagcgcctgtggatctgcccgagctggcgtgaaatccctgacccggatgcggtcaatgttatgctcgatcccggccttgcattcggcaccggtacccaccctaccacctctctgtgcctggaatggctcgacgggctggatctgaacggtaaaaccgtgatcgatttcggctgcggctccgggatcctggcgatcgccgccctgaaactgggtgcgaaagaagctatcggtatcgatatcgatccgcaggcgattcaggccagcagggacaacgcagagcgcaacggcgtttcagacaggctgaccctttacctctctgataaaaagcctcagacgctctctgcggacgttgtggtggccaatatcctggccggtccgctgcgtgaactggcgccggtgatcggcgcactgccgcaggccggcggattactcgggttatccggtgtgctcgccactcaggcagaaggtgtggcagatgcttaccgtgacgtctttgagattgatgagattgccgaaaaagaagaatggtgccggattaccgcgacaaaacgcggctgatattcttactttttggtatataaatcgtgcatttgcgtgattcagtgaatatattttaagcagtttcacgcaaacgcattttattctgaaaattaaatcagaaaaccgcactgtatgctattttacgctaacttattgttacaaaacattaattaataaaatctgaaaaaagcaataaaaaaaatttcgccgtaaaggtcgatttgctcaaagtttgtcctttcatatctttgaaaaaatgcgtaatatacgcgcccttgcagtcacagtatggccacacttcttcgtctatgcgtatcggacaataccagttgaaaaaccgccttatcgcggcccctatggcaggcatcaccgatcggcctttccggtcgttgtgctatgaaatgggcgcgggtatggccgtctcagagatgctctcttccaaccctcaggtctggaagacggacaaatcgagattacgcatggtacacagtgatgagccaggtatccgttctgtgcagatagccggtaatgatcccggtgaaatggcggccgcggcaaagattaatgttgccggtggtgcgcaggtcatcgatatcaatatggggtgtccggcaaaaaaagtgaaccgtaagctggcaggctccgccctgctgcgttatccggcgctggtggaagagattctgaaagcggtggttaatgcggtggacgtgcccgtcacactgaaaattcgcaccggctggtcaccggaagaacggaactgtgtcacgattgcccaattggccgagcgttgcggtattcaggctcttacgatccatggcaggacccgcgcctgtctgtttaatggtgaagccgaatacgacaacatccggacagttaagcagactgttgccatcccggttattgccaatggcgacattactgacccgcttaaagccagagcagtactggactacaccggcgcagacgcgctgatgattggtcgtgctgctcagggaagaccctggatcttccgggaaatccagcactatctggacacaggcgaactgttgccgcccctgcccggtgcagaggtgaaacgcataatgtgtgagcatgtgcgggaattgcacgacttttacggtcaaagcaagggagcccgcatagcccgcaagcacgtttcctggtatatgcaggaacatgcacctgatgttcagtttcggcgcacattcaacgccattgaggatgccggcgaacagctggaggcgttggaggcatattttgaaaattttttgcgtaaataaagaaaagagctgacagaactatgttcgaacaacgcgtaaattctgacgtactaaccgttgctactgtaaattcacaagatcaggtaactcaaaagccgttacgtgactcagttaagcaagcactgaagaactattttgctcaattaaacggtcaggatgttaatgaactgtatgagctggtactggctgaagttgaacagccattgttggacatggtgatgcaatacacccgtggtaaccagacccgcgctgccctgatgatgggtatcaaccgcggtactctgcgtaaaaaactgaaaaaatacggcatgaactaagtaataccgtttaatgcattgaatcgaaaagccttttcaggataactgaaagggcttttttgttgcctttatcataagtaattccacctcattgtttttcacttccccgctgtgtttaataatactgtaacggcttgcgcagcggacaggattctgtacgcaccgctgttcagaatataaagggagttatatatggataatcagtatctattattatatggaagcttcttatatgcatgattatatgagaaattttaatccccccttttcctctccccgggataagcacaattaaaaagcaacaaccggagtgttctgtttcttttcctcttccatgataaccgcagatatttcgccgggcagcgaagcattgattttcctgtccgctactatccccggtacagcagcccggatatcaggagagagaaatgaacgcactgcaacaggcattacatcaatcattacaggcagttcaggcggagaattccccggcattgatacacagcgggaaattactgaattttgtaccgtcacaaatttcacagctgcaggatgacctgttgtgcctgtacgggcagccgctgccgctttttccggatccgcaggatatcagcggcaagctggaagcagcacagcgactgcaccggcaaattcccgggcagaatggggtgttgtggcagcatttccggaaagaagccgcaaagctgaacccggcggatgatgccgcactgaccgatgtgctgctccgctggctgttcacccgcctctctgccgcagaccatacctgaacgaaaacgccttttccgggcagcagaaaaggcgttactgtttctcatcaaaccagggctgctgaaataaccggacgatcagcgcgagattgtcttgtccgacagcagcaccaatttcatcacacaatccggttttgatggcctcataagcgtcatagcattgctgcccgtgcggtgtcattttcacccccttgagctttttactgccctgaacatcaaagatggtgattaatcccttctcttccatctgtcggatgaatttatgaatcgcctgacgggagatggtcactgtcgcggaaatatcggctatggataccggctggtcatacaccctcgataaaatgtaccactccgaattactcatgtgaatttcgctccggacattccagagcgcatcaatccgctcacggagcagtgtgtgccgctcactgataaggtcaataaaatccaggtcgtttaatgcaattttcacgcgctccccctttcctttttgtgcagtataccaaaaacacttcgtcaactaagttgaccattgtcgcaaagtgcgttactttccttttcgtcaacctggttgatgaaataataggataagaatgtgactacagaggcagcaatacaggtacgctacccgaaaatgatgctgagcgtactgatggccgggacatttaccggtctgttcggggaaaccgcattaaatatggcgctcaccaatctgatgagccagttctctctctccgccggtcaggcacagtggctggtgaccggctatctgctgaccctggcggtgtttgtgccggtgtcggcgtttctggtgcgctggtttaataccagggtactgatcctcacggcgctgtgtgtgtcgctcgccggttgtctgattgccgcactggcccccggttttgcggtactgcttctggggcgggttattcaggccgtcggtaccggggtgatattgcctgtgatgatgagtgccgcactgctcattttcccggtctatcagcgcgggatggtgatgggaatggtggggattgccattaccctggcaccggcgctggggccgacaatttccggctttattatcaccttgttcagctggcatgccattttctggctcagtgcgctggtctatgccgccatcattttacttgccgtgaagtctattgcgccgattggtgatatcaccagaccgcgtattgatattttgtctctcctgctttcctccgccggattcagcggcatcatctacgggctggctatcctggcggaacacagcctgcgtgatcccgctgtctggggttccctgctggcgggggttctctgccttgccgtatttgcccgccgtcagacgcacatggcgatgccgatgatccacccggatgtgttccgtaatccgctgtttattattggcctgatcatgatgatcctgagcatgatgagtgtgctctccgccgcgattattcttccggtattcctgaaagatgtgctgatgctgagcgcggcaatggccgggatcctgctgctgccgggcaatattatcaacgtactgttctcaccacttatcggttttctctataaccggtttgactcgcgcccgtttgtggtctgcggctccctgtttatgctgatgagttctgcgctgtttctgtatgccgtcggggagaatgcaccggtgtggcagattgtcgccgcctttatgctcctgtgtctgggtgtcacctgtgtgattatgcccgcgcagactaccgcgatgagtgctttacccgcccggttatatgctgatggctctgctgtctggaataccttttatcaggtagccggcgccgtcggtaccgcatcggccatctctctgatgtctttttaccgtgatgcggcagcaacacagcagacagcaaccgcggcactggcgtcggggatccatgccgtattctggctgagcctgctgctcggtctgttatcactggttttcgccttcttcctgaagaaaccgcatccgcagaatgatgcggcgtaatcacctgtattaaccctgatggctgctccggcagcctttttcattatttatcacagccgtcatccgcacacatgccttttgtgacggtaataattatcattcaatgagataagatgtatgactgcactttaccgcacttccctgttccggctttcgctggcggctttactggttgccggtgtctgccacgccgctgaagatgaaatcgtggtcaccgccgcgccgcctgccgtcagtccgctggaaaataacggcacataccgcgccacacacagcgacagcgccaccaaaacggccacgccgctgaataaagtcccttcctcggtctccgtgatcagtgaggaggaaatcaccgcccgcaatcctgccacactgaaacaggcactgggatacacacccggcgtagtgaccggcacctccggcagttcatccgttttcgacagtgtgatgatgcgcggcttccataatgtcagccagaatatctatctggacggattaaaagttcagggggatatgtatgcggaaagcaggatgctgccggaatttatgcagcggattgatgtgctgaaaggcccggcttctgtgctttacgggcaatccaatccgggcggcgtggtcaccatgacctccaaacggccgcagatgaacccgctgcgggaaatccgcttacaggcggggaatcaccacctgtggcagaccgggtttgatctcagtgatgccctgaatgatgaggaaacacaggcttaccgcctgaccggcacactgcatgaccagcaccaacagcaacagggggagcgggaacggtattatgctttacagggttcttatctctggcagccggatgatgccacttctttactgcttaccgcccaggccatgaatgcgccgcgtaacggctattacggctggctgccgcgtgaaggtaccgttgacggcggcgctgccgggaaattgccgaccggttttaacgaaggcgagccgggctataaccgctttgaacggcagcagcggctgatcggctggcagtttgatcatacattcaatgataactggtcactgcatcagggcgtgcgttaccagcagatcagcaccaactggcgcactatttacggcagcggactatgcagcagcaatccggcggcctgttacggcgtaccgcagcaggatctctcatcaacgcttgcccgcagccatatacataatgacgagcggctgtccggtctggtcactgatacccatgtcatccacaacatcagcggccacggctggcgcaataccctgatgacaggtgtggattactcacagctgcgcaaccggatggttaatgaggtcggtgttgctgccccgctggatctgcgatccccgcaatacggcaatctgacaatcatcccggggataaattcgaaagcaataaataaaaaccaccaaatcgggatctacgcccaggatcagctctttctgaaggactggacattcaccctcggcggccgttatgacgaaaacaccagcaaatcccgcggccgcgataacatcagcggtgataccactcatcaccagactgaccacgagtttacctggcgcggcggtgtgaactatcagctgccttatggtttcgctccgtatttcagctacagcgaatcctttgagccaagtactgcggccacggtcagcggcaaaccgctggatccgtcacggggtaaacagtatgaagccgggctgaaatacctgccggaaaatgccgcgctgtctgccacactcgccgtttatgagctgaccaaagacaataacctgcaccgtgacccgctgaatccgtttttcagtgtgcagggcggaaaaatccgttcgcgggggattgagctggaaaccaaagcggcgctgacctacaactggaacctgatcgccggctatgcttataccgatacccgtttccgtcagcaggcggagaataccaatcatcaccccgcgatggtaccggcgcataccgcctctctgtggacagattatacctttgacaccacgccgctcagcggcctgactatcggcggcggcgtacgctataacggcaaaacacagggggatgatgccaacagcttcactgttcccgcctataccgtggcggatatgatgctgcgctaccggcttgataacctcccggctcttgaagatgcggagatcgcgctaaatatcaataacctgttcaataaacactatgtatctgcctgctttacggatgcagcatgcagttggggcaatgaccggcagataaccaccacactgacccttcactggtaaaacagataaaaaagggggattccgcaataaaccggaatccccgaaaaggcgggatcactaagagagaccgctgcccgccgcagcgcactgcacatcaggccttattcatcgcctgagtaaaaaattcatcactgtaagcctgtgcgaagtggaaggaggccatccgctcagccagacggaagaacgcttccacttcctgtgcattgaggattttccggtcgcggatgcgtgtttccagctcagccagagcgttacgggataaccgggtcacttccggaagatcaaaaccggtcagcatgccgttttgtttgcggatcacaccgtcggccagcacagtatcgatatcaccggtatgtgtcatctgcaccacactgcctgcggcgtgcaccggtgccacaaaaccatctctgtggcggataataatgatgtccgcttttttcccggccaccagcgagccgatctcgttttccatgcccagcacctgtgctgcgccgagggtcgcccagtgcagagcctcgcggacagtcggggtaatttcaaacggcatagtatcgcgctgatgtactttttcattcgccagtgcacgttcaatctgcagtgccatattcatctgagtgaacagatcatctgttgtcacaccggtgaaatccgttccgagtgcaaacgggatcccatactccgcacaaggctgataaggcaggaaccccatccccatctgtaactcgctggacggcgtgctcgccacatggccgccgcttttggcgatcagtttccagtcttcgccggtcagcccgttactgtgggcgtggatatgtcccggcagcagtaaaccgtggtcgtccagttcacgcaaaccacgcagcagaaccgaggttttggccgccccggtgtgtgaggcgtgtttcaggccgagaccatccgccagacggatctgttttgccgattcagcaaacggcaccgtaccgggatcggaaatcagcatcccggctgtcagccgatcctggtcgcggaacagggtttcagagatctcacgggcacaatcacgccgtgcatccatggaagcaaaaccggcgggtttaaaatcatacacctgcataccatagccgtagacaccacggatgccgctgtccttcatagcagcaacagcattagcggcatgttccggtgagttaacacagtcattcacctcataaaccgttgtcgtaccggcattcagagcgctgatattaccgttcagaaccgccgcatacatattgtctgccgtcatcattgcgccgaatgcatggaaggtattgataagaaatgccggtaacgactcttccgccgaaacaccacggaacagtgccatccagttatggcggtgcgcatcgatcatgcccggagtgacaatcgccccttgtgcatcaatcacctgcgcatcggtgtggtgatcaaatgcctgtatatccgcactgattgcgctgatccggttgccctcgatcagtatcgcgccgttgataatatcgccggtggcatcatccattgtgatgattgtgccgccgcgaatgatttttttattcttttccatgcaggcctctctggttaatatcaaaaatgtactatacagtacattataatctgattataaaatcaacctgtaaatcggcagcataaaatccatctcattttccgggaaaaaaacacgtttattctcccttccgggataaaaaagaaaataattcttatttttcagcaaaatatcccgtgatttctgacaggaaaaaataagaaatccgcgcgtttttacctcattttttgcgccgtactgacataaaaactcagcacaaaacatcaacaaagcgtaaaacaaaggtcttaagcactgaaataatcccccggaaagatcactcccgaagaaaaataaccaaaccaacccgttgttatctctgctgttattgtcatgtgcttataaattaatttaattaattgataaagttttctctatagtttccgataaccagtcatttactgagtatccggaggaatgatgcttctgcgcagcattaaaatcagtacgaaactcttcgtggcttttggcttttccattctgctgatggtcatcagcgccacactgtcggttgtcagcctgaataacgccaatgacggtattcgcgatatcctggatgaggattatccgatcacggtaaaagcaaacttactgattgattattttcatgattttgtcggcattcagcaactcctgctgctggatgataaaaatcctcagattcgtcagctggccgccggtgcttctgaaaccagtaaaaaaatcaccctgattctggatgaatttaatgagacgctgaaggatgaggcatctcagaacatcctgaaagagatccgctcagtccgccagcagtacctcacctcacagcgccgcatggttcagttttcacaaaacggagatgaagcctctgcaatcaatgagatggtgaataccaccgccggtattcagcgcgcttaccgcgacaatgtgatgcagttaatcgccattcaggatacgcatatgaaagaggcgggaaatcaggtggaaagtaatttcaaaaccaaccgcctcctgctgatcgctctgactatcatcagtgccatcatcagtgccgtactggcgcggattattgtggtcagtatcacccgtccgctggataaagccgtcacgcttgcccgcgccattgcacagggggatctgacacagcaggtcaatgtcacacatcatgatgaaaccggggtgctgcttaatgccctggctgaaatgcaggttcatttgcaggatatcgtaacagaggtgaaaaacggtgcagtcagcctgtctgccaccgcagagcagattgttgccggtaaccagaacctggccgcccgcacggaagaacaggccgcgtcagtggaggaaactgccgcctcaatggagcagatcaccgcgacagtgaaaaataccgccgccaatacccttaaggcaaccgcactgtcggcggataccgccggggtggtgaaacacaacggcgaaatgatggagcaggtgacggataaaatccgtatgatcaacacgacggccacccggatgtcagatattatcaatctgattgattctattgcgttccagaccaatattctggcgctgaatgccgctgtggaagccgccagagccggtgagcacggacgcggttttgcggtggtggccggtgaagtccgcctgctggcacagcgcagtgccgattcagccggtgagatccgcaccctgattgaaaactctgccggtcagacccgcgaggggctgcaactggtggaggaagccgctgaatcactgcgcggtattgtcagtaacgtcagccagatggctgatttactgcatgagataggccacgccagtcatgaacagactgacgggatcactcagatcaacagtgctatcgggctgattgattccgctacccagcagaatgccaccctggtggaacagtctgttgccgcagcctcctccctgaatgagcaggccggtacactcaatgagatggttggtgtctttcagcttgccggaacgccgtcttcagtatcttaatgattaacgggcagataacgggcatgactgcccgttatcactgttccggacggctgtcagagaaaaccgtacatggcggaaaagaaccagccgcacacacaggaaaccccgacaccgatcagtcccggcgcaataaagctgtggttaatcacaaagcgcccgattttggtggtacctgagcggtcgaactggatagccgccaggtcactcgggtaggtcggcagaatatagtagccgtagcaggccggtgcggatgccacaatataagccggattgaccccgatcatcagcgcgagcggaaccactgccgccagagctgccgcctgcgagttgacaaacttggacaccagcagcagcaccactgcgtaagcccacggatactctttgaccagcgatcccagcacaccctcaatctgctcaaggtgagcaccgaacatggtttccgccatccacgcgataccgtaaaccgccacaatcgcgatcatccccgagcggaatacttcattcttcgaaatagatgccggtttggtatcggtaaagataataattaatgcccctgccagcagcataaagatctgaatcaccaaaaccatcgacagcggcttgccgtcaaaaaccggccgcagccacgaaaatgcccccagtgatgcaacgaccgcgatagaggccagaaagatccacattgccagccagttactggccggtaattttttattgagcagggtggcggtatcgccgtagacgtatttccggttctccggttttgcgataaatgactgaaattccggatccttatccaggtctttaccgcgataccagctgaagataccgatgcacagtatcccgatcagggtggatggaatggtgatcgccagcaggtcaacaaagctcagatgtttgccgttgatggtcacatcccccagcatggcgaccagggagaccaccgcaaccgacactgggctggcgattatccccatctgggagcctattgtactggccgccatcggcctttccgggcggatattatttttaatcgcgacatcataaatgataggtaagatggtgtagacgacgtgcccggtaccgcacagaatagtcagcagacaggtcacaaacggcgccacaatcgagacatatttcgggttacgccgcagcagacgttctgctatctgaagcatcacatccagtcccccggaagcctgcagcgtagccgatgccgccacgaccgcaataatcaccagcatcacatccaccggcggctttccgggctttaagtggaagacaaaaaccagcaccaccaggcctatcccgcccagcaaacccagggcaatcccgcctttacgcgccccgtaaaacagacagatcaataccacgacaagctggatagcaaaatccataactaactccttttaggtacttaaaaatccgtgggtctgtatcacctggtttcactataaagcgcacaaaataacaattttttgatgtaaacaataaaaactgccggaaaacagaacagtttttctataacagtgacgggggtaaaaaaatcgccggggaggtattcaggggatggatacaaaccggtaaccaataccggtttcggtgatgaaatgctgaggacgagccggatccgtttccagtttctggcgcagatgtcccatgtaaatacgcaggtagtgggcgtgttcgacggcattcggcccccacacttcattgagcagctgccgctgagtcagtactttgccgctgtggccgataagaatggtcagcaggcggaattcaatcggtgtgagatgcacttcctccccgcctttcctgacctgacgcccggcaatatccacacagatatccccgaactcataaacgggatcatttttttcactgccgggatagcggcgcatcagcacccgcagccgcgcctgtaactccccgacaccaaagggtttggtcatatagtcatccgccccggcatccagggcggcaattttgtcatgctcactgtcacgggcggaaagcaccagcaccggcacggaactccactgacggaattcctgcacaaaggtgatgccgtcaccgtccggcagacccagatcaaggatcaccagatccggtttgcgggtcgccgcttccaccagcccgcgagccaggtcttccgcttcaaacacacgcacagaatcccctcccagcgcagtgcgcagaaggcggcggatccctttttcatcttcaataatcagtacagtggtcacaacgggttatcatcttcatcaatcacgggcgggtcttcacagggtagacggatatggaagcttgcgccacccccgtcacggtttccggctaaaatagtgccgccgtgcacttccgcaatcgcccggcagatagccagcccgaggccgatccccggaatggcggattctttctggccgcgcgaaaatttctcaaatatctgtgcttcctgtccggccgggatgcccgggccgttatcccacacttcaatatcaatcatattgtccgacaaccgcgagcggatgccaatctgcgcctgcggcccggcgtattttatcgcgttttccagcagattgatcaacacccgttcaaacagcgggccatccgcgcaaatcagctgcatcgggtcattgaggtcaatctgcaccgaatccgtatcaaaacgcggtttcagcatttgcagggcactgccgatcacctcttccagcggtagccactctttattgagattaaagccgccggactggatccgcgccatatccagcaggttattgaccagccgcgtggtgctgaggatatgctggcggatctcattggcctgcgcggcatacggtgaaccttcgctggtcagatccagcgtcaggatctccgcctgaccaaacagtacagtcagcggcgtgcgcagatcatgggacagcgccgccagcagcgagttgcgcacctgctcgcgttcactgaccagccgcgactgcgcctcgcgttctgtcagcgtgcggcgttccagcgcccccgctgccagcaggatcagggtttccagcagccgctgctgttcggggatcagcagctgacggcggttatacggctccacaatcaccacgccgtatactttttctgtcgtgcagaccggcaggatctgatacggcacaccgggcagagtaccggtgccgaacccggcgggctggcctttgtcataactccagcggatgatggcatcgtcacggccgttatccgccaccccgccccctgccgggatcaggttaccctgctcatccggcagcagcatttcacagcgggcatgcaggctgtggctgataaagtggcaactgacagaggcaatatcatcagattcccgcgccaccgccagcgctttcgacatttcatacagatgccaggtgcgctgctcgcggtaacgtgccaccctggcctgatagcggacaccggcagtcaggctgccgatcaccagcccgacggtcatcatcaccgcgaaggtgagcagatactgcatatccgaaacggccagcgtgcctttcgggttgataagaaagatatcaaagctgataacgttaataatggtggcaaacacagaaggccagcgcccgtaaaaccgcgccaccaccaccacgcccaggatatagagcattaccaggttggcgttatcaaaggccatcagccagtgatgcgccataagggtagtgacggcgcaaatcagtgccgcgacaacacaaccctgtaaatcggttttgtgtttatccaggaacggccggttgtcgctgaatttctcacggttttccggctgccggtcctgcggggcgatcatcaccacatccagatcagcggcactgcggctgagctgttcctgtaatttgtcgcgccgccaccaggatgtccgctcatggcggacaatcataattttgccgaggttattttcacgcgcatagcggatcaccgcgcggctctcttccggctccgccagcgttgccgtggtggcccccagttgctgcgccagcgacagggtggtgaggatagtacgccgctgcggtgacggcagcttatgccgtgcgggggtttcgacaaaaatggcatgccagtcactgccgagccgtgccgccagccgggctgcggcacgcaccagtttttcattgccgccgtccggacgcagacagaccagaatcgcatcccgggtgtgccagactttctcctgacctttccgctcccgccaggcacgcatttgttcatcgacacggtcagtggtccgccgcagcgccagttcacgcagtgccagcagattgcctttgcggaaaaagtgctcgatcgcccgctccgcctgagcagggagatacacttttccctcacgcagtctgtcgagcaggtcgtccggcgttaaatccaccagtacgatttcatcggcggcatcaaacaccgggtccggtacggtttcgcgcacacgaacaccggtcacgccgccgacaatgtcgttcaggctttccaggtgctgcacattgatggtggtgaggacatcgatcccggcattgagcagctcttccacatcctgccagcgtttcgggtggcgggcgccggggatgttggtgtgcgccagttcgtccatcaggatcaccgccggatggatcgccagcgcgcggtcgagatcaaaccccgccacctgccgcccccggtagttatgctttttcagcggcaggatgcgcagcccttccagcaaggcagcggtttcactgcggccgtgggtttccaccaccccggccagcacatcaatgccctgctcacgcagccgctgcgcctctttcagcatggcgtaggttttcccgacacccgcacaggcaccgaagaaaatcttcagtttcccgcgcgggcgctctgtgacctgtgccagtaactggtcaggatcgggacgcagtggctcatcatacataatgctgtccttccgttagttcaggctggttttgtccgccgcatgtgcatccagcgccagattcagtgccagcacattcacgaccggcacaccggtaaacgcaggcaccggagtggtgatatgttcgcggatcagtttctccacctccgcctgtgtcatattacgcgctttggccacccgcgcggcctgccagtaagcggcatccggagagatatccggatccagcccgctggcagaggcggtcaccaggtcaaccggcaccgggcgggaagcatccgggttttccgcccttaatgtttctgcccgctgcgccacccgctgtaacagttccgggttgccggtgctcaggttgctgccgccggaactcagggcgttatacggatgctctgctgtttctgacgggcgtccgtgaaaataaccgggctgtgtgaactgctggccgatcagcgccgagcctttgacttcgttattcacttcaatcagtgagccgttggcctggcgggcaaaccaccactccccgagcgaggtggtcagcagaggataaaatacccctgttaccagtgccagaaccagaaatattatgattgcgggacgtatctgactcattgtttatccttatactaaccctgtcagggtcagtaacatatctatcaattttataccgataaacggtacaaccaggccacccagtccgtagatccacagattacggcgtaacatctgtgcggcgctcagggcatggtacggcacccctttcagcgccagcgggatcagaaagacaataatcagggcgttgaagataaccgcacttaacatggcggaatccggcgagtgcagacgcatgatattgagtgcatccagctgcggataggtcaccgcaaacgccgccgggataatggcaaaatacttggcgatatcattggagatactgaacgtggtcagcgagccgcgtgtcatcagcatctgtttaccgatatgcaccacctcaatcagcttggtcgggttggagtccagatcgaccatattccccgcctctttcgccgcctgggtgcccgagttcatcgccaccgcgacatccgcctgtgccagagccggggcatcattggtgccgtcgccggtcattgccaccagccgcccttctttctgatactgacggatcagcgccagtttggcttccggtgtagcttctgccaggaaatcatccaccccggcttcggcagcaatggcagcggcggtcagccggttatcccccgtgatcatcacggttttgatccccatctggcgcagttgtgcaaagcgttcgcggatcccgccttttacgatatctttcagggcgatcaccccgagtacacgatgttcttcggccactaccagcggggttccgccgctgcgtgcaacctcttccaccagtttgtcgacctgtgccggaaaatgaccgtggttagcctcaatatagcggcggatagcatcgacggaacctttacggatagtgcgcccgtccacattgatgccgctcatgcgggtctgggcggtaaacgggataaaagtcgcattcaggctttccagatcacgcgcccgcaggctgaaacgctgttttgccagcaccacgatactgcgtccttccggggtttcatccgccagtgatgacaactgagctgcatctgccagcgttctttcatccacaccgggtgcagccaggaaagcagaggcctggcggttacccagtgtgatggtgccggttttgtccagcaacagcacgtccacatccccggcagcttccactgcacggccgctggtggcgatgacattggcggccagcatacggctcatccctgccacaccaatagctgaaagcaggccgctgatggtagtcgggatcagacagaccagcagggcaatcatcactgtcagagtgaccggatggccggtataggcggtaaacggccagagtgtcgccaccgccagcaggaacacaatactcagtgcggccagcaggatggtcagggcaatctcattcggcgttttgctgcgtttcgcaccttcgaccatgctgatcatgcggtcaaggaagctgtcacccgggttggcactgcactcaataatcagccagtcggacagaatccgggtaccgccggtaacagaagcaaaatcgccgccggattcgcggatcaccggcgcggattcaccggtaatggcgctctcatccacagatgcaccgccttccagcacggtaccgtcacacgggatcagatcccctgcttccaccagtaccaaatcccctttgcgcagggtatcagcggagaccatatcaaaaccgctgtcgcgctgtgccgcatgcagacgccgtgcgcggctggtttttttcattcctttcaggctgtcggcctgcgctttgctgcgcccttccgccagcgcttcggcgaagttggcaaacagcacggtaaaccacagccacagggcgacggtgagggtaaatccgccgttaccgctgataaatccgctgaacatcccggcggccagcagtgtggtcagcaggctgccgcaccagacaataaacatcaccgggttctgccactgcactaccggcgagagcttgcggaatgcatccggcagtgcgcggcgcaccagtgcgggttcaaataatcgctgtgtctgacgactcatggtgttctcccgtcaatcacttaagtaaatcaagaaattccgccaccggccccagtgccagtgcaggaacaaaggtcagtgcgccgatcagcaatattgcggcgatcagcagcccggtaaacagcggcccggttgtcggcagtgtgcctgccccggcggtccggatggttttgctgaccagcgagcctgccagcatcatcaccagcgcaatcaccacgaagcggcccgcgagcatgcagaatgccagcagcaggttccagaacggggtgttggtactcagcccggcaaaggcactgccgttattgtttgaagcggatgagagggcatacagcacttcactgaagccgtgagcgcccggattgagcatcgcgccgcgtccggcctccgtcatcatagccagcgccgtgccgccgagaaccagcgccggggtgaccagaatcgccagcgcggtcagtttcatctcccgcacctcgatttttttgctgaggtattccggcgtgcggccaatcatcagtccggcgataaaaacggcgaggaaaacaaacagcatcattccgtagaaaccggcacccacaccgccgaagatcacttcaccgatctgcatcagccacagcggcacaagaccgcccagcggagtcagggagtcatgcatactgtttaccgcaccacaggaggcggcggtggtcacggccacaaacagcccggtggcaaggataccgaagcggctctctttcccttccatattgaaggtgctgtcgatccccatccccgcaaaagccggattaccgtgagtttcgctccacatcaccgccacagcggcggcaacaaagacaatggtcatcgcggccagcagtgcactgccctggcccgggttaccggcacagcgcccgaatgcaaaacagagtgccgccgggatcaggaaaatcgccagcatctgcacaaagttggtcagtgcggtcgggttttcaaacggatgcgctgagttggcaccgaagaagccgccgccgttggtaccgagcagtttaatcgcttcctgggaggccacaggccccatcggcagcacctgctgcacgccttccggggtgataatggtctggtagtcatggaagttctgaatcacgccctgcgaaataaagaacagcgcaataatcacggagagcggcagcagcagccacagcgtgatgcgggtcagatccgcccacgcattgccgagtgtctgcacagaacggcggcacagagcgcggatcagggcaaacgccacagcaataccggtggcggcagacaggaagttctgtactgtcagtccggccatctgactgaaatagctgactgcggattctccgctgtaagactgccagttggtattagtgacaaaactgaccgctgtattcagcgccagatcccatgacatccccgggaagtgacgcggattgagcggtaaatccgcctgcagcatcaggatcgccgtcaggaaaatcagtcccagcgcattaaacagcagcagtgctgtcagatatccctgccagcgcatctcgtcgcggccaatccccgcaaagcgccacagcacaccttccacacggcgcagaaccggcagcggtgtaccgtcaataaagcagaccagcaggttactgagcagttttgccgcaatcagcaaaacaatcagaaacccggcgataagtaaaaaggcattcgcggccatcagaatttctccgcattaatcagggcataaaggaggtatgccagcagcagtaatgtaccggcgatgcctgcaataagagccagactcataacttgtccttacatgtgtgaggtattcatcattgagtctagaaaagcgggtgcaaagatgtcgcaaaattcggcgggaaaggtataaaaaaagtataaaaatgcgggtttccgtaaacccgccctgttatcaaagatccagatggaaaaactgattatgttcaccggtctgataatcaccaaacgccgatccggcctgaaaaccgcagcgccggtacagtgccagtgccggttcaaaatccggatggcagccggtctccaggctcaggcacgtcatgccgctctgttttgcctgtgcaataatatgtagcaacagcagtttacccgctcctttgccgcgaaaatccgggtgagcccgcattgattttatttctccctgtgcggcggaaatttgtttcagcgccccgaccgctgcgatacggtcaccggcccatacactccagacacggatgttatccgcccgcaggccgcttttatccagggcataaacatgttcctgcggtgtattctgtgccattccctgtaaatgcagagtaatcagtgcgccggtttgtggtgaggataaatcatccgtttttattacaaaatcatattcagtcatcagtgcctcttatcgctgcaaacgggaaagccccggctgtcagttatcattgctgcaataatcattccgcttttgctgcccgccggatccgccggtttccgttgcggaaaataccgccctgcaccattgcagtgcaccatcagagagcatccgcccataaatacgtagtcccggactgatttacccggacttatccgccccttacactgatcacgttcagggcgtaatatccgcaggaaaatcaataacaggatgtgtaataaaaaccgctataaccgcaggactcctgtttgctgtactgtttgccgccgccccgcttcaggcaaaacaggcagcaatacagcagaccgaagccagagcactgagcggcaatattaccgcgcagataacgctggccgataccttccgcacaaaacaggatattgtgcaggccaaatactggtaccggaaagcggcggaacagaacaatccttatgcccagaatgagccgggaaaactgatcctgctcagcaatcactccgtgacagcattacaggaagccagagtctggttcgagaaagccgcatcacagaatcagccggatgcgctttatcagccgggggtgatgtattatcgcggaaaaggttgtgaacgcggtgattgcgccattgcccggagtttttatgagagagcggcagcacagtcacacggctccgctcagttttacctcgcgatgatgtatctccggggacacggcgtggcgcaggattacgaaaaaggtgtggcactgatgaaagcctcctgtgaaaacggtgagccggaagcctgcccgtgggtcagaaatctgacagaaaatgaggacaaattccgtcagattttttccggaaaaccgtcatccgatcagccgcccagataggcactcctgaccgcttcattcaccagcagtgcctgaccggtatcctccagtacgacccgcccgttttcaagcacataacctctgtctgccagtttcagcgcctggttggcattctgttcgaccaggaagatagtcatacccacatcacgcagttcacggatggtatcgaaaatctgcatgatgataatcggcgccagcccgagggacggttcatccagcagtaacagctgagggctgctcatcagcgcacggccgatagccagcatctgctgttcaccgccggacattgttcccgcccgctgatgacgccgctcctgaagcctagggaaaagctcatatacctgagcaatccgtgcctgatactgcgttttggatgcaaaaaatccgcccatggccagattctcttccaccgtcatccgcccgaacacgcgccgcccttccggcaccagtgcaatgtctttgcgcatgatctgcgccgtcggcagtgcagtgatgttttccccgagatagcggatctcgccggtggtcgcccgcggttccccgcacagcgtgctcagcagtgtggttttccccgcaccgttcgcgccgatcagagtgactatttcccctttgcgcaccgacaggctgacttcatgcagtgcctgaattttgccgtactgcgcggagacatttataaattccagcatcagtatgcctcccccaaatacgcgcggatcacatccggatgattgcggatcgccgccggggtgccgcttgccagcggcgttccctggttcaccacatagatccggtctgaaattcccatcaccagtttcatatcatgttcgatcagcaggacagacacgccgtgctccgcccgcagttccgcgatcagtgcatccagatcgtccgtttctttcgggttcagcccggccgccggttcatccagcatcagaatatccggccgggtcaccatacagcgggcgatttccagccgccgctgctgaccgtacgccagattacctgcctgccggttcgccagtgccgtcagcccgattctgtccagccacatcaccgcgcgttccgtggcttcacgctgatcacggcggaacgagggcagcgtcagcagcccggcgagtaatccgcttttatgatgctgatgctgtgccaccagcaggttttcaatcaccgtcatttcccggaataaacgtacatgctggaaagtgcggatcatgccgagacgggcaatcgcctgtccggataatccctgcaccggttttccgcgcagcaggatctgcccgtccgccggtttgtagaagccggtcagacagttgaagatcgtggtttttcccgcgccgttgggtccgatcagagagactatctcgccccggttcagttccagcgacacattgttcaccgccagcaacccgccgaaacgcatggtaaggccggagacctgcaataaggtatcggtcattgcgcacctccggttttttccgcatccgttgtgctgactttcaggtgcgggcgcgacaccggcagtaatccctgcggccgccagaccatcatcagcaccatcagcgccccgagcaacagcatgctgtaagcattcagatcgcgcatcatttcccgggaaaccaccaggataacggcggccagaatcaccgaggtttgtgagcccatccctcccagcaccacaacagccagcacaaaggctgattccgtaaaggtaaaggattccgggctgataaagccctgacgggcggcaaataaagtgcccgccaccccggcaaaggcggcactgatggtaaatgccgtcagtttgatacgtgtcgggctgagtcccagcgaacggcaggcgatttcatcctcacgcagcgcttcccaggccctgcccagcggcatcctcagtaaccggctgataataaacagtgttgccagtaccagcagcaatgcgaccaaatacaggaaaataatacgatcgcccggatcatacgccaggccgaagaaattatggaacgtatcccagccgccctctttggcggtccggctgaactccagcccgaacagggtcggtttcgggatctgactgatgccgttcggcccgccggtaaactccgtattattcagcagcagaatacggacaatttccccgaaaccgagcgtcacaatcgccagataatccccgcgcaaccgcagcaccgggaagccgagcagcagcccggacagcgccgcggcaataccggccagcggcagactctgccagaacccccagccgaaatagtggttcatcagcccgtaagtgtaggcaccgatggcgtagaatccggcgtagcccagcaccagaaggccggacagcccgaccaccacattcagcccgaggccgagcatcacatagataagggttaaggtggcgatatccacactgccgcgtgacaccataaacggccagataatggcagcgagaataatcagcccggcaataattttctgcgtattggtggaaccgtcaaaacccggcaatgagcagctgcttttcggcagacgcgccgtcagttttttcagtgacgggcgcaccagctgaaaaataaagacaatcacacagccggtaccgatccactcccagcggacagcatcggcgttgcggacaatcagacgggtgccatcgagggacaattgcagccccatcatcacggaggccagcacaaacagcgttgcggtggcgacaatggcgttgatccagtgagatttagtcataccttttcaacctccggacgcccgaggatcccggtcggcatcaccagtaacacaaggataagcaagccgaatgaaaccacatctttatattccgtactgaaataggcggaggtcatggcttctgatacgccgaggatcaccccgccgatcatcgcccccggaatactgccgatcccgccgagaaccgctgcggtaaaggctttcatcccggccataaagccgatgtacgggttgatcacgccgtaaaactgccccagcagcaccccggccaccgccgccatcgccgcaccgatcacaaaggtcagtgcaatcacgcgatcggtgttgatcccgagtaaaccggccattttcagatcttccgcacaggcacggcaggcgcgtcccatccgtgagtaacggataaagagggtcagcgccagcattgccagcaccgtcaccacccagatagtgatctgcatggcagaaaccgtggcggagaaaccaccgctctccccgaaggtccagcggccgttaatcagcccgggcagcgcgagatcgcgggagccctgggaaagactgacaaagttttgcagaaaaatggacatcccgatcgccgaaatcagggcaatcagccgttttgagtgacggacgggccggtaagcgacccgttcgatactccagccataggcactggcaataattatcgctgtaataaatgcagcggtaattaacaaccagccgacatcaatccccagcatcatcagcccggcaatcacaataaacgagacgtaactgccgatcatatacacttcgccgtgggcaaagttaatcataccgataatgccgtacaccatggtgtaaccgatggcgatcagggcataggtgcttcccagcgttaatccgttcagcaattgctgcgtaaaatataataattgttctgacatagcgcactcccctgaaacacactgcccgcatcagtcaccgctgcggatcagttcagcggtgatgaggttccgtctttgtgccattcaaatacgccgaactcgaaacctttcagatccccgtttggtgtccagctcagttcgcccattacggtgtcaaccggtttgcctttcagatcagcggccagatccgctggttccatgctgccgctgcgctgcatcgcggtagtcagggactgtaatgccgcataggttgtccagacgaacggcccggtggaatccagtttcttcgccgccagggcatccaccaccggtttgttggcaggaacctggtcatagcgtttcggcagcgtcaccagcatgccttcggatgcgtcaccggcaatgttggagagtgaggagttacccacgccttccggtcccataaagcggatattcagccccgcctgttttgcctggcgtaaaatctgtcccatttccgggtagtagccgccgaaatagacaaaatcgacattatctttcttcaggcgcgccaccagcgcggagaaatctttatcacccgccgtcaccccttcaaacagcacttctttcaccccggctttgttcagattgtctttcacggaacgcgccaggccttcaccgtactgctgtttgtcatgcaccacggcaatgcgctgcggtttcactttttcgaggatatattttgctgcggtcgggccctggtcagaatccaggccggtggtacgcatgatcaggttgtaaccgcgcgtggttaaatccgcattggttgccgccggggtgatcatcaggatcccttcatcctcataaatatctgacgcaggttgtgtggaggaggagcagaggtgcccgatcacatagcgcatgccgtcattgataactttgttggccaccgccaccgcctgtttcgggtcacaggcgtcatcgtattcggtgatcaccagtttattgccgttaatcccgcctttggcgttgatgtcctcaaccgcctggcgggctccggtaaattccatatcaccgtattgtgcgaccggtccggacatagcgcccaccaccgcaactttaatatcttcagcgtacgccgctgcacttaatgcacaggatacagctccggcaatgattgccattttcattgtttttttcatcagaacatccccatcggttagctttgcagtgaccggacggtcagcatgtgcggtattttcggaattccgttataatgagtcgtattacattaattaattctttattttcagttcattaaacaggatttttattctgaaaagcaaatcagaaaaggagattattgcatcattaacaggataatatccggttgcaatcgggtgttttttcggcaaaaaacagtgttataaactggttaatgattcgttaaggataacttaatgcggaaattcaccgccggaaaaatagttttccccactattccgatagcaattatctctctttattattagattcatccggcgaagtattaacccgttatctgattcagtttactgattgatttatcctgatccgggttttctgttcactatgactgatggaatggtccgcgacatgaataaactaacgggcatgctcctgctcacttttacgctgccgctgaccgctgcggccgccccccggccgctgtgatgatgcggcacaggatattaaccggcaaaatacatttattattaccggcgcgaaatattacgggccggtaaaataaatcactatcacgtcttaccacccgatggggcttatcctgtgggtgaaagaaaaactgcacttcggtccgtgcagcaatctgacacaatatgattatgaataccgggaaatggcgatagaagaaggtcaggtgccgattacgattacgcaaaccacgcagatcgtgccggaaaaaccggatcgtcagcctgacagaatcctataaaacaataccggataaccaatcccggcaatcagaaacccgctaccgctatcagaataaccggctggtttcgcctacacctgctataaatgggatctgtacggaaactgtgaattacaaaccatgatcaaggccattcagctggaaggctccgccgccattcaaagcagcgggatcacgccggaatcccgctacgaatattactgatttatcctattttcatcgccagtacagcagcgatattgcgggcggccacttcaatattaaccgccgcctgtgccagtgcctcatccagagagcaaatccgcgggatcacggagaacacggcatcaataccgtgctcatgcacgaccgcatagtcctcgctcatcccgcctgccagcgcaataaccggaattccccgcgcttttgcggctttcgccacacccgccggggtttttccctgaatcgtctggctgtccatccgtccttccccggtgatcaccaggtcggcatctttcaccactgaattcagatccagtgtttcgatcaccatctcaattcccggctgcatccgcgcatcaagccatgccatcaaaggaacgcccatgccgccggctgctccggcccccgcgacatcactcagtgatttaccggtcagggattcaatcacttccccgtaatgacgcagcgccgcatccagctcgctgacaatcgccggtgtcgcgcctttctgcggcccgaaggtggcggatgctcctttcggcccgcacagcggattattcacatcacaggccaccacaaactctgttttcgccagacgcggatccagcccggatagatccgcggaagccagttttgccagcgcactgccgccgaacggcagtgaattcccctgttcatcgcggaataccacccccagcgcctgcatcatcccggcaccaccgtcattggtggcactgccgccgatgccgaggattattttctccgcaccgtcatccagtgctgccaggataagttccccggtgccgaaggtggtggtcacacgcggatcccgctgtgcaggaggtaccagatgtaacccggaagctgcggccatctcaataatggccgttttaccgtcaccggacagcccgtaaaacccggtcactttattccccagcggggccgtaacttcggtttctttcagtgttccctgtgtggcttcaataatggagaccactgtgccctcgccaccgtccgccatcggcaacttgatgtactgcgcatccgggaaaacggttctgaaacccgcttccaccgcatcggcgacctgaagggcggtcagactctctttaaatgaatccggagcaatcactattttcatacttaattccttttacccgccaaacccgaagacaccgaaaatcagtgtggagacaatagcgatcaccagacccaccatggtttcgtaaggcagtaatttcagacgctcatgaacctgcatattgacactgccgccggtcgcatggaagaagctgccgtgcggcatctggtcgagcaccaccgcaccggcgtggatcatcgccgccccggccagcgcactcacacccagatcaagcagcgtggagctgaataccgcagacgccaccgccgtacctgctgtggtggacgcggttgccattgacatcagtgccccggaaatcggtgccagcagataggatggcagaccggacgccgtcaggccgttaattaacacatctttcaggccggagttggcgataatccccgccagggttccggtccccagcagcataatcgccaccggtgccatccggctcagcccggaggtaataaagtggttggactgacggatacgccccataatcagcgcaccggccaggccgccgactggcagcgcgatcagcgggtcaatgctgataccggcgatcggacgcagtgacagcagaaaaatagctaccagcggtgcactcatcgctgcccaaaatcccggcaatctgccgtcatggtgagccgcaatcagctcttcctgtgtcacttttgaaccacggtgaaccagacgtttcgccagaaaatatgccacgatcagcccgaaaatacccgggataatccccgccgccatcagtgatgtcagcggcacgttaaagttatctgccgccgcaatggtgttcgggttcggtgacatcacgttacccgctttaccgccgccgatcatcgccagcagaatcgccattttggacagatccgcgcggtgcgcaatcgccagtgcaatcggtgaaaccgtaataaccgctacgtcgataaacacaccgacggctgtcagtaacagagtggctaccgccagcgccagcagcgcccgcttctcacccactttgcggacaatggtttccgcaatagtatttgccgcaccggactcaatcagtacccccgccagcacacccgccgccagaatacgcagcaccgcgttagtgatcccctgggcaccggtcaccatcagtgtcaccgtctgcaccagatccgcgccgccgaccaatcctccggccagtgcccccgccatcatcccgtataccggcggtacttttttcagtattaaccctatcgccacgaccagcgcaaccattgcgcccaaagctgaaacagtcaccatgtgcagactcctgctgtagttatgattattcggacagaacaggatgcattatggcggcagccatcagcttaagcttgagaggttccgacaaaaaagaacgggctgaaaccgcgtattttgtacaaacgtacaaatcacagatcagtcagaataccgaaataaagctgaatcattgattctaatctattgatatttaagccagtaatcgattcaacacgctgaaggcggtaacggagggtatttgtgtgaatatgcagcgtttttgtggtttgagacagatcacaattctgatcaaaataggtcttcagggtatgacacaacacacggcggctgtccgccgctttcagtttctgccaggcagaagccagttcagcggcctgccagctatcctgaaatccctgtaacagcgcgggtaatttgacttcatcataaaaaatggttttctggcggctgtacgccggggtctgccccagttgctgcacagcgcaggcactctgccaggagcggtgcaggccattgtgtccgtgaaaaaaaccgccgacatacatcagcagatccggcagctggcggcgcagtgcctgtaactgcttctgcaccggagagagcggctgaaaatccgcatcacaggccaccggtttcagtaccaccagggaatttattccccggatactgaccagcagatccattttcagattatcaatatagtccaccagacggtgaaactgctcgtgatcaggcgctggcagtgcgaggatcagggcaatacggggtttatcgggggagatcccgagataggcggcgatggattttactgactgcggctgctgctccgggcttatcagctggctgaccagctcatcacggtaacggcgatcccactgggatttctccagcagatcggcctgctccagcaccagctccgccgccatgcgcaccagttcggcgtagttgcgcacttcatccggtttgccggaaatcccgaccacacccaccatggtatcgcggaaaatcaccggcagattaatgcccggtttcacgcctttcagcgtggcagcggtggcttcatcaatttccacaatccggttttctgtcagcgccagcaccgcgccctcgtgacgctgattgacccgctgcgggtcaccggacgcaataatcactccctgcgcattcatcacattcacggagtaactgaggatttgcatcgcccgctgaacaatcagccgagcagtgcgctgatcaagctgaaccggtgtcatatcaggacggattctgtgcctggcgtgctgccgcaatggcagactcaatggcttttctggccagcggactgttgcgccagcaggtggagccggtgagtgccgcaccggcactcagcagggattgggcatctgcggcagcaagctgattaagatcagaaaaacccatttgttcaaggcgttcgataactttcgtgcccacgccctttaccgccagtaaaactgccttgtcttcagacgaaaaagccataatatccccgtcagtgattatcagaaaatactatggctaccataacagattgcggcggaaacgggagcattgttatcagccctcaatcgcctcgcgcagttttttcatggcatttttttccagctgacggacgcgctctgcagaaacgccgtatttatccgccagttcctggagggtggttttgctgtcatcatccagccagcgggcacggataatgtcacggctgcgctcatccagtgaatcaatcgccagggtgagtttgtccgtggcatggttatcccagttatcttcctcgatttcatccgcgaaatcagaggatttatcttccaggaacagtgccggtgccaccaccgggtgatcgccgtcgtcgtcatcggacatatcaaatgccatgtcctgcgccgccatacgggattccatttccagcacatctttgctggttacccccagctctttcgccaccatttccacttcgtcctggttaaaccagcccagacgttttttggatttgcgcagattaaaaaacagtttgcgctgtgctttggtggtggcgattttaacgatgcgccagttgcgcagcacatactcatgaatttcagctttgatccagtgaaccgcaaacgacaccaggcgcacacccatttccgggttaaaacggcgcaccgctttcatcagcccgatattgccttcctggataagatccgcctgaggcaggccataacctgaataactgcgggcgacatggataacaaaccgcagatgcgacatgatcagttttttcgcggcctcaaggtcgccgtcataatacagacgctcagccagctctttttcttcttcggctgtcagcatcggatactggttagctgcccggatataggcctcaatgctcccttgcggaactaaaacagggaattgcgtatctttagtcattcagtcctcagtacaaataaaaatgacgtcggcagacggtaatggtgaatagtgtacaacacaggacagagttacgcctatcacttagtgccggcgttgtcatttggttgaatgtaaaccggtgatgcgggatacccggcgggataatgccccgccggatagtgagacagttactgcggcataaaattccgtaaatggcggaccgttgccagccaggcggcaacccagccaatcatacctgacaccagcacaatcagcagtgcttcgtcccagtccagcccggtcagtgcaaatgtggtgccgaaaattttggacacatcggtcacaacatcacccagtttccagaccagcagagaggataacaccagtgacaatattgcgccgaacgccccgagcagcatgccgccgttgaggaacggacgcagaataaagccgtctgtcgcgccgatcagtttcatcacattgatggtttcgcggcggctgaaaatattgagccgcacgctgttgccaatcaccaggaacagggccacaaccatcagcacgccaatcagcgaggcaatctgccccaccaggccggtcagtgctgccagccgggcaaaccagctgtcatccatccgcacctcatcaatcccggacagtgccgtgacacgatcacgcagggtggagagcgtttcgctgctctgcatatccactttcggtgtgacgatagccactgccggcagcgggttttcttccagcatatccagcgcggtactgaatccggaccaggcgcggaattcggttatcgcctggtcgcgggagagataattaacgctctccacgccgtcgagcgctttcagctcgtccgccagtttctgaccgccctgttcatccagacctttatccagataaacggtcagttgcggggtcggataccactgttccgccgcatggctgacgtttttccagacgatataaaagacactcggcagtgtcagggagattgcaatcaccatcactgtcagcagtgttgacagcggctggcgcagcatatcgcccagcgtgtttacccacgcatgccgccactgttcccgccagccgcctttcagcgctttggctttggacggcattttttttacgggtttacgcggttgtttagccatgatgacctcccgccatgcgtccctgactcagcgtcagcacgcggtaattacgccgttcaatcagcatgatatcgtgtgttgccatcagtacggtgacacccacacggttaaactcttcaaacagccgtaaaatgccttctgacagctcactgtccaggttaccggtcggttcatccgccagcagcaccatcggtttattgaccaccgcacgggcaatgcccacgcgctgctgttcaccgccggagagctggaccgggaagttacgggccttatccagcagaccgactttatccagcgcggcactgacgcggcggcggatatcttccgggctggcaccggcaatgatcagcggcatcgccacattgtcatataccgtgcgatccagcagcagatggtgatcctgaaaaatcatgccgatttggcggcgcaggaaaggcacttcacggtttttcagacggctgatgttgtggccgtcaaataaaatggtgccgtcactgggtcgctcaatcccacaaatcagtttcagcagggtactctttcctgcgccggaatggccggtcaggaagaccatctccgccgggcggatatggaaatccaccccctggagcgcctgacggccgcctaaataggctttactgacgtgttcaaagcgaatcatggatgattaatcctcccgggcaaaaagtgcctcaataaaatcaccggctttgaaaggacgcagatcttcaataccttcacccaccccgatataccggataggaataccgaactggtctgcaatggcaaagatcacaccgcctttcgccgttccgtcaagtttggtcagagtcagcccggtcaggccgaccgcttcattaaagagacgcgcctggctgacagcgttctgtccggtactggcatctaatgtcagcataatctcatgcggggcatcttcatcaagtttcttcatcacccgcacgattttcttgagctcttccatcaggtgtgctttgttctgcagacgccctgcggtgtccgcaatcagcacatccacccctttggctttggcggactgaatggcatcaaaaatcaccgaggccggatccgcgccggtgtgctgtgccaccaccgggatattgttgcgctcgccccagacctggagctgttccaccgcagctgcacggaaggtatctccggcagccagcatgacagatttaccctgagcctgatactgacgcgccattttaccgatggtggtggttttaccgacaccattgacgccgaccatcaggatcacatacggttttttatcttcaatttccagcggcttatcgactgttgccaggatctcgcccatctcttcgcgcagtttaacgaataaggcttccgcatctttcagatcacggcggctggcatgctgagtcagactggtgatgatcttgcgggtggtttccacaccgacatcggccaccagcaattgttcttccagctcttcaaacagatcgtcatcgatctttttgccacggaagatcccgaagaaaccggagccgatattctcacgggtgcgcaccaggctgcgtttcagacgggcaaagaacccttcttttgccggtctttcctgcgtgtccgccggtgccggggattcattttcaaccagtgccgcgtcctgtgcttccgcttcggcttccgcgagacggcgggcttcttcctcctgcgcaagacgctgttcttcggccagacgcgcctgttcagcggcttcggcatcacgctgtttctgctcttgtgctaaacgctgctgttctgcggcttcttcttccgcacggcgtttatcttccgcgatgcgctgctgttttgccgcttccgcatcacgcagtgcctgctcttcagcccggcgctgttcttcttccgcacgctgctgctctgcggcctgctcttcggccagacgtttttcttccgcgatacgctgctgtttcgcggcttccgcgtcacgcagtgcctgctctttcagacggcgctgttcttcttcggcgcgctgctgctctgtagcctgttcttcggccagccgtttttcttccgcgatacgctgttgcttcgcggcttccgcctgacgtctttcttctgccagacgctgctgtttcgcggcttccgcatcacgacgggcctgttcttctgcctgacgagcctgttccgctgcctctgcatcacggcgggcctgctcttcggctaaacgcgcctgttcagccgcttccgcatcacggcgggcctgctcttcggctaaacgcgcctgttcagccgcttctgtatcacggcgggcctgttcttcggctaaacgcgcctgttcagccgcctctgcatcacgacgagtctgctcttcggctaaacgtgcctgttcttcctgagccgcctgttcctgctgcgcctgttcatcttcttctttacggccaaaacccagccaggaaaaaaaaccttttttcttctcttttgccacagccactatactccttgcatactgccacccgtcaccttccggcacggtatgtccggaaaatcctgagcagatatggcgtctttatcatcattagttgcaaatcagacgcagtctatcatttcacaggatggttgcgcatcggctttccgtaatttcatattaaatttaaacgaatttttacaaaacctgcgtataatattccgctgttttcccgtctgttattcatatttctgaattaataatttcagaattaataagttacgaaggttatggttaaaaaagctcaaaccgcaccacaagggcagatccgcattatcgccggtctctggcgcggacgtaaactgccggttctgacacatgacggcctgcgcccgaccactgatcgcgtgcgcgaaaccctgtttaactggctgatgccggtgattaacggcgcacgctgtcttgatgcgtttgcaggcagcggcgcactcggttttgaggcgctttcccgctatgcctccgccgtgacatttacggaactcaaccgcgctgttgcggctcagatcagcgccaatgcgcgtctgctcaaatgtgaacaggcgactgtcgttaatcagagcgccctgcagtttctggcacagccgggaacaccgtttgatgtggtgtttctcgacccgccgttccgtaaagggctgcttcaggaaaccgttgatttactggagcagaataactggctcagcccggaagcaatgatctacattgaagccgaggcggaatcagacacactggttgttccgggtaactgggtgtgccaccgggagaaggtggccggccaggttgcgtatcgtctttatctgcgtcagacgcagacgactgaacaggagtccgtatgttcctgattaatattggccgcatactgatgctggccgtctggggttttctgattttcagcctggtgcatccgttcccgaaaccgctgaatatctttatgcatatcgccaccttttttatggtggtgatgcacgggctgctgatgtcgctgttcaatgccggtcagccgcaggataagaaactgacagccgccggtaaagtacgtgtctttttattcggtgtgtttgaactgctcgccctgctgcgccgccagcaggcagaactgaaagatcaggataaaccctgatcagcgcagcggctcataacggataaaccgcgtcccctgcattgacagcgttccgcgtgaatgcagggtaatctctttatattcatcctctttgatgtacaccacaatggttttccccgacagcggcgtgaaatgcacctcataacggaaggtttccgggaaaaccacatcccgctcacgggaacgcatattcgggtacggataatcctttttctctgtcaccgtgacctgatatgtcaccaccgcagaatgatcgtttatctcattttgtttgcgctgttcaaagaagcggcgggtcgccaggataataatcaaagcggcgacaataaaacctaacaaaccgaatttgttcatgagtatggttgttttcctgcaatctggttgatcgtgttctgtaaatacgggatattatcaaatattcaggtgttaatcgccatcaacatacctcaaggacaccctatgaattggccatttattgctgtacttttttccggctggctctatatcgacgccgcctaccggggaccaaactggcagcgctgggttttccgtcccgtcaccctgctgctgttgctgctgtgggcgtggagcggggattacgggctggatatctccgggtatctggtgtgtgtcgggctgttagtggccattgtctccgataccatccgcctggttgctgataataaaatcgacctgtcactgtataccagtgccgtgttttatctgctctatgccctgagcttcgccctgctcaataatttcaccttctatattccgctgatgattgccgtgccggtgattgccatcgcggtactcgcgctgctctggtacaaactcggcgatcataaagtaccggtgctgacggcgctgctcagtgcgctggtgatgggctggcttgccggagagcagttcttcgggctgggtaccgattacaacttctccctgatgatcggggcattctgtctggtgctgaacctgatcctgtggctgattaaccgcttcctgtttacctttaaactggccaaagcggtgtattccaccttctatttcctcgggcatttcctgattgtccgcgctatcacgctgatgtaattctgcccctgacaacaggagcgcacaatttgccaataattatgcgcccctgttgttgactctggagtagactccaatgtgtacacttcctgttaatgagaaaaattaacatcaactcaccgttgaacagggaggtgtttatgcacccgaacaaagaacatcatgagcatactcataccagcaactgctgcggcagcaaatctgcctgcaccaccggcggaaaaagtgagtcacaggctcatcagtcacacgaccataccgcacacgatcacagtgagcatgaacatccggaacacgacgacgatgagtcccgtgcgcatggtcatgccccgcacgatcatgcgcattctgaacatgaccatgaccacgccggtcatgaacacgcacacggcagctgctgttcacacgatcacgccgccccggatgataccgcactgcctgaattaagcggcagccagcgttacaactggcaggtggaagggatggactgcccgagctgtgcgcgcaagattgaaactgccgttctgaaaattgcggcggtcacccaggcaaaagtgatgtttgccaccgaaaaactggtggtggatgccgccggggatgtccgcgcggatgtgaccagtgctgttcagcaggccggatttgtcctctgggatctgaacggcagcagtgccgcaccgaagaaaaaagaagagcagagcctgctgaaacaggcaacgccgatgctgattctggcggtgctgattgccctcagctacgcgctggagtttgtgaacccggagttcggcaaatacgcctttatcgcctcaacgctgatcgggctgttcccgatcgccaaaagctcgctgcgtcttatccgctccggcaccccgtttgcgattgaaacgctgatgacggtcgcggcagtcggcgccataattatcggcgccactgaagaagcggccatggttatcctgctgttcctgctgggcgaaatgctggaatcctatgcggcaggccgtgcacggcggggagtcagcgcgctgatggcgctggtgccggaagatgcggtggtgattaaggacgggcagaaagtatccgtgccggttgcacagctgcgtcccggcgacattattgaaatcgcacctggcggacgcctgccgacagatgccgaacttctcagtgagtttgccagctttgacgaaagcgccctgaccggggaatccgtcccggttgagcgggcacagggtgaaaaagtggctgccggttcgctgtcagtggatcgcgcagtgcagatgaaagtggtctccgagcagggtcagaacgccatcgaccgtattctgacactgattgaggaagcggaagagcgccgtgcaccaatcgagcgctttatcgaccgtttcagccgctactatacgccgatgattatgctgttctccgccctggtgattgttattccgccgctgtttatgggccaggaatggtatccgtggatctaccgtggtctgacactgctgctgattggttgtccgtgtgcactggtaatttccacccctgcggctatcacctccgcgctggccgccgccacccgccgtggtgcgctgatcaaaggcggtgccgcactggagcagctgggtaccgtgaccactgtcgcgctggataaaaccggtacgctgacagagggtaaaccgcaggtgactgatattgttgccctgaataaccacagtgatgcggatgtgctgacgtttgcctccgccgtggaaagcgggtcacatcacccgttagccaaagcgattctggagcgcactgaagctctggggctgactatcaccgaagcggaaaaccgtaaagcccatgccggtaaaggggttgaaggtgaactcagcggtgtgaccatcctggtcagcgcaccgggtaaactggcagacggcctgctgaccgatgccgctgcagcagaagtgacccggctggaaaatgaagggaaaacggtcgttgctgtggttgcaggtaaccggctaaccggacttatcgccatgcaggatacgctgcgcagtgatgccattgaagccatcagccagctgaaagcgatgggtgtcagcgccgtgatgctgaccggggataacccgcgtgcagccgctgctatcgccggtaccatcggcatggatttccgtgccggactgatgccggaagataaagtcaaagcggtgatggcgctgaataatgaacatcacaccatgatggtcggcgacggtatcaatgatgccccggcaatgaaagcagccagtatcggggttgccatgggcagcgggaccgatgtggcactggaaactgccgatgccgcactgactcacaaccgcctgaccggcattgccgaagtgatcacgctgtcgcgggccacccgtaagattatccgcgagaacattactatcgctctgggtctgaaagccgtgttcctggtcaccaccctgatggggctgaccggcctgtgggttgcggttctggctgactccggtgcgaccgcactggtgaccgccaacgctgtccgcctgctgcgggtcatgaaaaaataaccacgggttactgactgaaaagggatgctgcggcatccctttttttatctcaccaccaggatcgtggctttaatatgcttgagataggccacaatcgtgaaggtgacaatcaccagcagcgaccaggatgcccattttccggcatgcacggtcgcccacgccccgatctggttcggatactgccagacaccgaaaaaggtaccgaagttttccgccagccagataaaaaagccgatcagcacaaaactcagtaacaacggcattttgcgctctttatcatacggcgtgtaataaaccatggtccgcgcatacagcccgagaataaaggcggtgagataccagcggtaatcgccggtgaagtgatgagcaaagaaattcacataaatcgccagcgcaatcagggtcgccagccagtacggcgggaagttttcaatccggacgttcaggaagcgccacgcctgaatcacataactgccgacagccgcatacataaacccggtgaataacggcacattccataatttggtatacgcctcatcaggataactccacgaaccgatagcggatgaggttttaaacaactccatgacaaaaccgaccacatggaaaatacagatggctttcagttcatccgtggtttccagctttttccacaccatagcagcctgaaacaggaccgccaggatcagcagaaaatcataacgggggatcccggcgacaccggcggcaggcaccagaaacagggcgaggaaaaagaaggcggcaaacaggcacgcccgtgcctctttcagaccaaaaaaccagaattcaaggataaaccggcgccagccggtcagagacgagcgtttctgcgccagcagaaaggtatcaaagcggtcaagcatggttcagtccctgaaagatggattacagcgcactctcttttttgcggatcagatagcggtacggcgcggtttcagcctcctgggccaccagctcatgctccataaaacggcagaaccccggaatgtcccgcgtggttgccggatcatccgccaccaccagcaaaacttcaccggtattcatcccgcggatggttttacgcaccagcatcaccggctccgggcagcgcagcccgagtgtgtcgagtgttttatcggcacaggaaaaagtatcagacatcatgattgtcctgttaagtaacgaatccgggaattataccggaaataaaagcccggcgccgcttctgtgtttttaatcttccgggccgttttccctccgggagagtcctttgcttttgttgcgcaaacggcgtattattgcgcgctgagattattgggttccctcaccccaaccaccaaaaaggtacaatatgtttgatttatctgcccgccagcggcgcactgcgcttatctggttatcactttttcatgttctgatcattacctccagtaactacctggtgcagttgccgatcaccattttcggcttccataccacctggggggctttcacgtttccgtttattttcctggcgactgacctgaccgtccgtatctacggcgcaccgctggcacggcggattattacctcggtgatgatcccggctctggcgatttcctatgtggtctccgccctgttctttcagggggaatgggccggttttgaggcactgtcacacttcaacctgtttgtggcgcggattgccgccgccagctttatggcctatgccctcggacagattctggatgtgaatgtctttaaccgcctgcgtcagaaccgccgctggtatgtggcaccggctgccgcgatgtttgtcggtaacctgatcgataccctggccttcttctttatcgccttctggcgcagtaccgatccgtttatggcggcaaactgggtggaaatcgccctggtggattacagtttcaaagtcactatctgcatgctgttcttcctgccggcttacggcgtactgcttaatctgatcctgcgctctttttttgcgcaacgcgctgacggctccctgcccgcgcatcactgattgttcatttttctgacacgcagaggcgctatcctgcctctgcgctgtcgtctgtatcacattttcccgatctgcccccgtgctcccggcccgtacagtgcgtcagctctcacatatccgttactgtaactgttagtctgattcagacggaatatccctcactgacaccataacgcgaatgcattcaggagtttgagtatgttaaaagtgatccaatccccggccaaatacattcagggtccggacgcgctttaccatgtgggtaaatacatcagaccattagcggaaaaaacgttggtgattgctgataaatttgtccgcgaactggtgggcgatattgtgaatgacagcctgagcgaatacgaagtcagcggtgtctttgaaaccttcggcggcgagtgtactcacgaggagatcgaccgtctgaccaaactggcgaaaaaccacaaatgccaggcggtactgggtgtgggcggcggtaaaacactggataccgccaaggccgtggcgcattttgccaaactgccggtgatcatcgccccgactatcgcatcaaccgatgcgccgaccagcgcactgtccgttatctataatgaactcggtgcgttcgacagctacctgttctatccgcagaacccgaacgtggtggtgatggataccaatatcattgcccgcgcgccggcacgtctgctggttgccggaatgggtgatgctctggccacttactttgaggcgcgtgcatgcagcgccgccggaaaagccactatggccggcggcagcaccacactggcggcactggcactggcgaatctctgctttgatactctgctcagcgacggcatcaaagccaaactggcggtggaagccggggtcagcaccaaagcggtggaaaacatcattgaagccaacaccctgctcagcgggctgggctttgaaagtgccggtcttgcggcggcacatgcaatccacaacggctttaccgcgctggaagagtgccaccacatgtaccacggtgaaaaagtggcgttcggtaccctcgtgcagttagtactggaaaatgccccggcggaagagctggaaaccgtactggaattctgtgcacaggtcggtctgccaatcaccctggaagaactgggtgtggacagcatcggtaccgagctggaagagaaagtgatggcggttgccgagctgagctgcgcggacaacgaaaccatctacaacatgccgtttgaagtcgattccgaccaggtctatgccgctattatggccgctgaccgcatgggacgcgactggctgtattaatctgcttattatgctgttccgtaacgcccggactaaccgggcgttattgcctgtaatccgccgccggtattcattatgcggcgggcaggatctctgcggcgatcgtatcaaccgctgctttcagttcctgtaaggtgatggtctgatccttattactcatctgctcacctttatttttgcggatcgcttcaagatacggtttttttgatacggaatcggtgattttccattcaaaatacattgacgtatccgcatcacggttaccgattgccagctgtgttccggcgacaatcagcatcaccggtaagacctcatagggtttgaaatctttgttggtgaccttaacggcagtaaccacgccctcaaaacgcagcacacccggtgcggcagtttctgtcagctgataccgttttgccagctcacttttgatctgctgattggtgtaattgagcagtacagtcataaactgtttacccattttgttattttcattcagcggattaaacacaaccggcgtgaagataagctttgttttcgggctttctgcggtgaaatcgtcagcacgccaggatttaatcacctcaccggaggctgtttctgtttcggccaggcgctgataatcactcagaaaatcagattgttcggtgtgatccggtaaacggcttgagcaggcggaaagcaggaataccacggagacggcaataatatatttagtgactgaatgtgatgcgaagttgttcattttcctctcaatatctttatcatcttctttaaaaatccgcccgatgctagcaccgggcgggagaggaaagtgaatagaaaatgcggtttatacgtaatattcagccggtttctgtcatcctttatttatgccagcgcccgcgccagcagagataccgggtgctcgcattttttgctggtggacatctcaatctgccatttgcaggtttcacagtcactgatcaccagatcaataccgctttcctctatctggcggaacagcggggaaccaatcgcctgagatgtttcgtagttttcctttttaaacccgtaagttccggcgataccacagcattgtgaatccagcacgatcagttccacccccggaattgagcggataagctcaagggaataggccgtccagcccattttttccatatggcacggcgtgtgataaccgactttcagcggcatgtgccgcagcaccggcttgcgcccgtcctgcatcagccggtaaagataacgggtcaccagctctatgttatcgcgcagcggcgcggtatccacatccaggatatgcggatattcatcccgcagggtaaaagcacaggtggaggatgtcgcaatcaccggcatcttctgttcaacaatggctttggtgagggattccacattcaccgccgcctgttttttcgcctgctttgcaaaaccgttagcgatcagcgccacaccacagcatttttcccgctccagcaactgcacgccgatccccatgctgttaaagaccttaatcacatctttaccgagctgcggatggttataattcacataacaaccgtggaagtacgcgacctgttcgccgaattttgcctgtttttcctgctgttttttgtaccagcggcggaaggtgccgaacgaatatttcggcagctcacggcggtgatcaatcttcagagcggtatccagcagtttacgcaccggtttcaggcctgtgatggtgttaaccaccggcgcaaacggcgaggaaagtgatcccatcagatcagtgtggctcagaatcgcgtcgcggatcttaggccgtgacggagaatacgtcagtttggcgcgggcgataatatccccgatacggacatctgacgggcacgccacttcgcagcgtttgcagttggtgcagagggtgagcgcatcatcatacagcatggcgtctttcaggcgcagccgctcgccgtccggccccgcctgtttcgggccgggataatccggattcaccttcgccaccgggcagtaagttgtacagactgtacatttgatgcagttctcgaactgtgtttgtcccgtactcatacctgtgcctccgttaccaccacgccaatctgcgccagaatctgttccgctgcgtacatcgcagtgacaagagaaacacccgccccgcatccctcctgtaacgggttatacccgcccagtaccgccccggcggcatacaggttagtgatagtgccgtgcgcatccgccggatgcagatatgcatctgtcgccaccccggcctccagatagcgctgacgggcaaacagatctgccgatgtccattcccggcgcggcaatgtttcagtcagattcagattcagcagcggctcataaatatgatcaatatcgctcgccagcccgttactgaagaaacttccggtcgccagcacaaactgctcagcctgtaccggaatatcaccgtgattgcgggtaaacagctgagtgatccgctcaccgtcacgacggacagaaatgacactgtcccccggcatcacaaatccgcccgcacggcggaaacggcgcagtaatgcctgatgcaggcggatccccagcagtgacggcgggagggtcggcagctgataaaccgttttattcagttgctgttgtaagaaggcaattccgtcactgttttccgccccgaagcaagccggtaaaatcagagtttgttcagtgatcccgcactgcgccagctcatcagccaactcctgccggttctgcggcaaatccagcacacgggcaatattgacagagcgaaactcactcggattattacgtaatttatccaggcacggcagatgcagggtatacgcctgcgccggatatccctgacgggtcagtgcggcggcagccatttccgcctgaaaatcaagaaaaccggtgatgctgataaccgcagccggctgccagttttcagtcattttttcgctcagaaccggcaccacatccggtgtcagccagctcatccgccactgccctgccggggtcagacgccagtgattacactccgccgatccctgtaacggtaaagtatcctgctgtaacagcgacattgcctgtgacacgcagcggcgcaccgcgctttcccctatcacactgtaaggatgagcaggcgcctgatgtgccagcgccgccagtgccgaaagcggctccgtgaccggctgcccgtccggcagcgccgagagcagatccagtgacgccgatgagaaatgcagcgcgctctgtccggcgctgataatggcgcagctcagtccgctctctgccagtttcacgccgcaggaaagaccggcaagaccgccgcccgcgataaccacatcatatttcatgctgctctccctgttcttctgtcccgctgttttccagcccgcataatccctgatacacccagccggtaaattcactctcccgcagcgcatttccccacgccaccggacgtacacctttccagcgttcattcaggaaatgcatcagttcggtttcggatttttcagcagtggtgactttcagctgagtcagcagctccgccgcacggcaggcgcacagctcgccctggcaggtgcccatgccgacacgggtacggcggcgcagatccagcaggttattcaccgtcaggctttctgtggcatagcgcacctcaccggcagtgaccgcttcacactcacagaccaggcttttatccagccgcgtggtgtgcggcaactctgccgcgcgatcgccgtgacggtacaccgccgatccgcgtaacggggcaggaagggagatcactttacgcagtgtctgttccgccgaatgcgccgagcccggcagcggctcctccgccgtggaacagtgcgccgttatacccagcttcgcgcacaccgcgtctgtcgcccactccgccatcagccggtaagtcatcagcttgccgccggtgatagtaaggaagccgcgcagtccgtcgcgtttttcatgatccagcagcacaatcccccggctgatactgcgcccggtcgggtcgtcatccgccgccaccagcggacgaacacccgcatacgcccgcagaatacgcgcctgcgccatcgccggtgccagccgtgagccttcgcggatcagggtatcgacctcatccgccgtgacaatcatgttgtcgatatcatcataaggaatatgaacagaagtggtgccgatcagggaaatggtatcccccggcaccaggatatccgcatcacccggtctgcggcagcggttaataacacgctggttaaggcggtgcccgaggatcagcagtgatcctttggcgggcagcatactgatatgcaccccggcaaaaccggcgatacgctggctccagatccctgccgcattaaccaccaccggcgcatacagcggataacggcggtgattctgatgatcataaacctgcacgccggttacctgatcgccctgacgcagtacatccgcgacttcgtgataagtcagcacctgcgcaccgtactcccgcgcatccagcatattggcggcagtcagacggaacggatccacggtgccatccggcactttcaccgcccccagcagcgccgggtttacagacggctcaaaacgcagcgcctcctgcggggacatcacctgtgtctcaatacccgccgcgcggcaggcctcggtaaacgtggcctggtacgccatctcatcttccggcagtgtgataaacaggccgtctgtttcctcaacacagtggcgggcaatgcgccgcaggatccggttttccgaaatacactcccgggcggattccggatccgtcaccgcataacgggcaccactgtgcagcaggccgtggttacggccggtcgcgccggtcgcgatatcaaaccgctccagtaacagagtgcgcaggccgcgccgggcacagtcccgcgccatcccggcaccggttgcgccaccgccgatgataatgacatccgcttcattgacaggtgaatcagacatgggttcctctcagtcatgttcctttattatggttatagcttagccgttttttctttccatatgattgataatgagcaaaaacgaaaacaaaacaccaaaaataagagcgaaataatccatagtcgtgatgaatatcacatatccgcaacatccggattttcccgcaggaaatacccgtaaactgactgattttccgcctgttttctgtctgattcacacctctgatatttagttattgtgccgccgctgatatacgctatgcttttagcgctaattatatgtttaccctgtatattttatgtaaccggaataaaacaaaataactacacacaagtaattacttaggtgattacctgaaatatccggttattcatccgcaaaaatgcaaaattagcgcttaaaacccttggttatatcaaatttaaacgatcagctattcgctatactttgaacagaatgtgattttataaccagtcagtaaccgaaaatgattagcgtttttatcaactgaaaggattcggttactgataacaattttaagtacccgtttcagatttcgtttttacattttaactttcgatttacctgaacaatggagaagcacagtgcaaacctttaatgccgatatcgcaattatcggagcaggcggtgcagggctgcgggcggcgattgccgctgcggaagctaacccgaacctgaaaattgctctgatctcaaaagtttacccgatgcgcagtcacaccgtggccgcagaaggtggctctgcggctgtgacacaatcccatgattcctatgattatcatttcagtgatacggtgtccgggggcgactggttatgtgagcaggatgtggtggagtattttgtcgaacactgtccgacagaaatgacccagctggaactgtggggctgcccgtggagccgcaaagaagacggttccgtcaacgtgcgccgtttcggcggtatgaaaatcgagcggacctggtttgccgccgataaaaccggctttcatatgctgcacaccctgttccagacctctctgaaataccctcagatccagcgttttgatgagcattttgtcctcgatatcattgtggatgaaggccatgtgcgcggtctggtggcactcaacatgatggaagggacaaaagttcagatccgcgccaattccgtgattatggccaccggcggcgccggtcgtgtttaccgctataacaccaacggcgggattgttaccggcgacggaatgggaatggctttccgtcacggcgtgccgctgcgggatatggaattcgttcagtatcacccgaccggtctgccgggttccggtattctgatgacagaaggctgccggggcgaaggcggtattctggtcaacaaagacggctaccgctatctgcaggattacggcatggggccggaaaccccgctcggccatccggaaaacaaatacatggaactcggcccgcgcgataaagtctcccaggcgttctggcacgagtggcgcaaaggccggactatcaaaaccaaccgtggtgatgtggtttatctggatctgcgtcatctcggcgagaaaaaactgctggagcgcctgccgtttatctgcgagctggcgaaagcgtatgtcggcgtggacccggtcaaagagccgatccctgtccgtccgaccgcgcactacaccatgggtggtatcgaaaccgaccagcgctgtgaaacccgcatcaaagggctgtttgctgtcggtgagtgttcctccgtcggtctgcacggcgctaaccgcctcggttccaactccctggcggaactggtggtcttcggtcgtctggccggggaagaagcggctaagcacgcacaggaaacacacgctgccaacagtaatgctatcgatgcccgcaccgctgacattgaaaacaatctgaaagcgctgatgaaccagaaaggctctgaaaactgggcaaaactgcgtgatgagatgggtgaggcaatggaagaaggctgcggtatctaccgcacaccggaactgatgcagaaaaccatcgataaactggctgagctgaaagagcgcttcagacgcgttgaaatcactgaccgctcttctgtcttcaataccgacctgctctacactattgagctgggctttggtctggatgtcgcggaatgtatggcgcactccgcctttaaccgtaaagaatcacgcggtgcgcaccagcgtctggatgaaggctgtactgagcgcgacgatgtcaatttcctgaaacacaccctcgccttccacaatccggacggttcgccgcatctggaatacagtgatgtgaagataaccaaatccgccccggcaaaacgtgtctacggtggtgaagcggcagcggctgaacaggcggcaaaagagaaggaaaacgtcaatggctgagatgaaaatgctgaaaatgtcagtgatgcgctataacccagaaacggataatgagccgcatgctgtcacgtatcaggtgccttacgatgagcagacctcactgctggatgcgctgggctatatcaaagacaacctggcgccggatctctcctaccgctggtcctgccggatggctatctgcggctcctgcggcatgatggtcaataaggtgccgaagctcgcctgtaaaaccttcctgcgcgaatatccgcagggcatggacattgaggcactcggcaacttcccgatcgaacgcgacctggttgtggatatgacgcactttatcgagagcctggaagctatcaagccttatattatcggcaatgaccgcaaaccgtccgaaggcccgaataaccagactccgggacagatggcaaaataccatcagttctccggctgcattaactgcggtctgtgctacgcggcctgtccgcagtttggtctgaatccggaattcctcggcccgggtgtgctgacactggcacagcgctataacaccgacagccgcgatcacggcaaaaaagagcggatgaaacaaatcaacggcgataacggcgtatggacctgtaccttcgtgggttactgctcggaagtctgtccgaaacatgtggacccggcagccgctattcagcagggtaaagccgccagtgcggaagattacattattgcccgtctgaaaccacaataaggaagagagaaatgacgaccaaacgtaagccttatgtgcgtgaaatgacaccgacatggtggaataaactcggtttttaccgtttttacatgctgcgggaaggcaccgcagtggtccagctctggttcagtctgctggttatgtacggcgtttactgtcttaagggcggcccggcggactgggcagggtatgtccacttcctgcagaatccggtggtggtactggttaatatcctgactctggccggtaccctgctgcacacggtgacctggttccagctggcaccgaaagccgtcaatatcgttatcaaagacgaaaaaatgggaccggagccgattgtccgtctgctctgggtggtgaccctcattgttaacgccgtcattctggccgttgcgttactgtgataaggaaggaaactgatatgattaatccgaatccgaaacgctcacaggaaccggttttctggggattgtttggcgcaggcggcatgtggagtgccattgtttcaccggccgttattgtgctgctggcttttctggtcccgtttgctgtcgcaccggatatgctcagttacagccgtatcctggccttctgccagggctttatcggcaaagcgttcctgctgctgatgattatcctgccgctgtggtgtgcgcttcaccgtatccaccactgcatgcatgacctgaaaattcatgttcctgcgggacgctgggtcttttacggcctggcaaccatcctcagtgtgatggccgtgattggtgtcatcacgctgtaatcattgtctgtcataaaaagaccggcgcttaaacgccggtctttttttatctgccgtcaggccacttccgcacggttaagctgccagtagcggtgctgccagtcaccactgaccagactgcggcgcgacaggcggatctgtccagctgaccagatccgccaaagaccagtgcccccggcacgcatgtttatgttcgcagccaaacgggttccactgccagaacaggtgccagaggccgttatgacagataaatccggccggatcattcatcaggccgcacaccggcgcagtatgccagccgggataatgagtatcccctgttctgttttttcagaaaccataaaagcacagatacggtactgaatactggcaccaaccctctaagataattcagaatccgatgggtaacagcattatcagaccggcataaaagccatgtcctgaataaaaaaacagtcttgcggaagaataacagaacggagggatacggcagaaaacagcggaattaaacacctgtcagaacaggtgtttcagcaggataaccggacagcataccgctacgcattaccacgtaaaaaatacgacacatcctcttcgacactttccatagccagtaatgcatccagcgtatcgcgggcttcctgttcgtcgataatgctcatggcaaaaccgacatgaaccagcacccatttccccagcatttctgatggctcaccttcacaaaccagtgcgatgttcacatcccgtctgacaccacacacttccacctgcgcattgtctgttacagagtcacccacggcaacgatttgcccgggaatacctaaacacataaccggctcctgattgactgataagtccttaccggactactgaatttcgatttgtctgacctgcatggcatcactgctgtccacctgcaggttatggctgccgcagtgcggacatccggtgttaaatccggccacactgaccggtttctgacactcccggcaccaggcctgcgccgggacggtggtgacatgcagttcagccccttccgccagtgaatcacggcagacgatatcaaagcagaaatgcagggcatcttcttcgatacaggataccgcactcagttcaagccagacagcggtgacgcgctgcgccccgctctgctttgcctgctgctcgataatatcaagcgcattctggcataacgtcacctcatgcatccgtctgtcctcaggacatcaggtcggctggcatttcaaatgcggcgcgacggcggcgttctttgacaatctcatccatcttattacggtcaaccaccattaatgcatgagtcggacacacttccacacaggcaggtccgcccgcacgggtatggcataaatcacacttgtggccttccgcgcggtactgcggaatggtgttcagcgcagtggtctgttgtgcaacaggacggctgaccacttccatggtgccgtaaggacaggcaatcacacaggttttgcagccgatacatttggtctgatcgacatacacaaaatcatctttacggctgatagcgccgttcgggcagacattggcacacggtgcgtcttcacactgacggcagacaaccgccgtactgatggtgtaccctttcatcacatgaatacggggaaagaattcatctttcaccactgtttcaataccggtttcctgctcttgatgcgaaacaacacaagcgacttcacatgtgtgacagccaatgcacttttttgggtctgcaatgatgaaacggttcatcatactctcctgaatgatacgcggcgacttcacttccggcactccggtgcagccgtcctctggttagaataatcaggaaataagcatgcatcgtgccagtctggcattttttttaatttcagtgaaatcagcgtattaataaataaagctgccgcgctgtgtgtcataatgagaatattcgtcacacagttcgacatttttgacgataatttctatcatcaatatgtgtcataatatattaggttttcatcccgccgaaaaataggggattggatcaaacttaaatcagacagcgatattcttttcttacagagtcattacaataatggttattacctctctgcaccttatttatacctataactacgcagaggggaattaattttaagagcaatccgtccggatcaggaatgtgaaagacgaagacgagcggagacgttgtggacaacactgacaagaccgaacacatacgccatgaacgtgaccagtaccggatattggtagatatcaccaactcagtgctttcccatctggagatggacggcctggttgctgaggtctcccgcgagatccaccggtttttcgggctgagccagataagcattgcattgtgtgataattacagttctgctgtatatctttgttattccagctattaccaggcccgcaaacccgcagaaaagacattatatcatctggatgaactgcatcctgatctggcacaggttctggacagtaaccagccgatgcgcctgacactcgacagtgccacagaggatccgctgtatcagcatgtctgtgcgcagggcatgacagaaaccctgctgctgccgctggcatttaaccataagccgctgggcgttctgatattatctcatgaaaataatcatatttttactgacgataactgtaatctgctcaagcagatagccgcccggtttgccattgcggtggataatgctgcggcctatgaagagatcacccgtctgaaagacagcctcaagcatgaaaacctgtggctgaacgaacagattcacaacaacgaaagtttcagtgaaatcattttccagagtgatgccatgcgcaacattctggagcaggtggatctggttgccgccagtgacagcaccgtgcttatcctcggcgaaaccggcaccgggaaggagctgatcgcccgcgccatccaccgtctgagtgaccgccatcaccgcagcatgatcaaaatgaactgcgcggccatcccgtccgggctgctggaaagcgacctgttcggccatgacaaaggcgccttcaccggcgcgaccaccactcatatcggccgctttgaaatggcggataaaagcaccctgttcctcgatgaaatcggcgatatgccgctggatctccagcccaaactgctgcgggtgttacaggagcgggaaattgagcgcattggcggtaataaggtgattccggtggatgtgcggctgattgccgccactaaccgcaacctgaaatccatgaccgatgagcgcgagttccgcgaagatctctactaccggctgaatgtgttccctatctggatcccgccgctgcgcgaacgtccggaggatattccgctgctggcgacctacttcacacagaagattgcccgccggatgaaccgcaatatcgactgcattccgcgtgatgccctcgaacagctgagccgctatccgtggcccggcaacgtgcgtgaactggaaaatgtgattgaacgggcggtgatcctgacgcgcgggaatacccttaacattcagttacatgaactgaatatcccaaagcattcacgcctgaaaacggcgctggaaaccccgagctcactggaaaaacggatgcagacagctgcaccggagaatgatgacgaagagcgcgaccggattattgctgccctgaaggccaccaacggcgttgttgccggtgcccggggtgccgcaacccgtctgggactgaaacggacaacattattatcccgtatgcagcggttaggtatttctgtacaggatatattcgaagaagataatcactaagctgatatttaaactgcagccactgaaataagaatatctcgcaaataaaaacatatcgcaaaagaaacagaatatctgtcgtaatatgttcatttatttctcaggcaataatatgtgatcaaaattcagaaactgaatacgactgagatcataattaaacaaaaaatgaaaatataaaaaaaccggcggtcatttctgagcgccggttttttatcatattaagacgaactgattaacacccttccgctgcttcacgcagacggcgcttaataccggtatattcctgaacaacataatgctcagcctgtttctgatccgcaatcggttcgacgcggacagcacagtatttatactccggtgtttttgtaatcgggctgaggttttccgccaccagctcgttacacgcaccaatccaccactgataggtcatgtaaaccgcccctttgttaggacgctcactgacattcgcgcgggtgataactttaccctgacgggatgccacccagaccagttcctgatctttaatccccagtgcagcagcatctgcggtattgatctggatatagcccggctcatccgccagtgccgccagtgctttacagttaccggtcatggagcggcaggagtagtgccccacttcacggacggtggccagcaccatcgggtagtcatcactgacctggtcgatcggcgcacgccattcacaggtatagaactgacctttgccgttcggagtatcaaagataccgccgtcgtacaggtattctgtaccctgatcgctgtccgccacatcgcggcacggccactggatataagccaggtccgccattttttcgtaggtcgcaccatagtagatagggcagagttcacgtaactcatcccagatctctttggtgttgttgtaatgcatcggataacccatggcagtggacatcagactgataatttcccagtccggtttcacatcgccgaccggctcaaccgctttatagaagcgctggaacccgcgatccgctgcggtatacacaccttcatgttccccccaggaggtggcagggaaaatcacgtcagcaatcgacgcggttttggtcataaagatatcctggacaatcagcagctccagtttatcgaaggtgcggcggatagtggccagatccggttcagtctgaagcggatcctcacccatcacgtagtgcgccttcagtacgccttcgtcgataaagtgcggaacctcactcagcggaataccgttttcggcaggcattttttcgatgccccagaatttggcaaatttctccagtgcggctttgtcttccacatactgatagcccggcagtgtgttcggcagtgcgcccatatcacaggcaccctgaacgttgttctgaccacggaccgggccgacaccgacatgcggtttacccaggttgccggtcagtaacgccagactggtcagtgcgcggacagtttccacaccctgatagaactgcgtcacacccataccccacagaatgaccgcattttcagctttcgcatacatacgggccgttttgcggatatcctcagctttcagaccggtgatcgcttccacggactccggtgtgtacggctcaaccagcttgcggtattcctcaaactgctcggtatggccgtcaatgaaggctttatcgtgcaggttttccgcaataatcacatgcgctaacgcattgataagcgcaatgtttgaaccgtttttcagtgccaaatgaatgtcagcaagacgcgctgattcaatatagcgcgggtcacagacaataatttgtgcacccttctctttcgccttaacaatacgacgggcgacgataggatgtgaatctgcggcattgtaaccgaagataaaaatacatttggtatcctcaatctcgacgattgagttactcattgcgccgttaccgaccgaacgctgcagacctgcaaccgaagggccgtgtcagacacgtgcgcagcagtcaatattgttactgccgactgctgcacgaacaaatttttgcatcacgaagttggcttcgttacccggaccacgggatgaaccggtagtcataatcgctttcgggccgtacttctctttgatagccaacaggcgggaactggcaaactcaatcgcctcttcccaggagaccggttccagtttgccaccacgctgacggcggatcatgggggtctttaagcggggggttaaaatcttggtgtcatgaatgaagtcccagccataataccctttcaggcagagctctccttcattggtgtgaccattcgcgccctccgcgccaatgatcttcccgttctccaccttcaggttaattttacagcctgaggcgcaatacgggcagacggtgatgactttttccatcaacattgctcctatatcttctcttagcggataaataccgccttatcaccaccagtcatgcagggtttatgccaattttaaagctgaaataaaatccctttaacttactgaatatattttgttttaatttttttgttatgaccatgacaggcgatggcaccgacgggatcgtcaaaaatgtcgaacggttctgcccggtgtcagacaacgacactgacgcaggcgcgtcccttcagaacaattttacaattgcatgatgaattataactgtgttaaagaagtacaatatgatggtgatcaatcatccgcaccgccggtttttcccgtatttcataacagtttacgaataatttcccgctgactgttgatatcggttccccggtgctgttttacaatgacactaacaatgacttaatttttcacggcgcttcctgtctgatactgcgcgtggctccgcgtattatcaaaataataaaagagagataaaaacctgatatgaaaattaatgatattttaatcgccctgctggtcgccgtgatctggggggtgaacttcgtggtgatcaaagtgggggtcaccggcattccgccgctgtttctcggggcactgcgttttctgtttgtggccctgcctgccgtcttctttattccgcgcccgaaaatcgccctgagccgcctggttatttacggcctgaccatctgcttcggccagtttgcctttctgttcagtgcggtcaaagccgggatgccggccgggatcgcctctgtggtattgcagtcccaggtctttttcaccattgttctgggtggcctgattctgaaagagtcgctgaaaatcagccaggtaatcggcattattgtcgctgtggccggtttaaccgtgctggcgaaaggcggggacagcggcagtctgaccgacattccgctgatggcactgatgatgaccctggccgggggcttctcctgggcctgcggtaatatctgcaaccgtatcattatgaaagagacaccggactgtaacgggatgtcactggtggcctggagtgcgctggtaccgattattccgtttatcctgatgtcgctgtggatggaaggtgcggacgcgattgtcagcagtatttcccatatcagcctgctgaccgtgggtgcgattatgtatctcgcttatctctccacctttgtgggatataccttatggagccgtctgctgggccgctacgaaacctggcgtgtcacgccgtttgctttgctggtgccgtttgccgggattgccagcagtgcgctgctgctgggggaaaccatcaccatgatgcagttcgccggtctcggctttattatggcgggcctgattctgacggtattcggcaaacgtctggtgacactgctgacccgcagaaaagcggtctgaagagaataaacagtcagtccgcccgggttttacgggcagactgacctgtgacgttacagtgtgttcagtctttcacgaatcctggctgtaattgctgatccggctgcaatttccacggagtatcatagtcactgtctccccgcggatcattctccggtgtactgcccgcactcataacatcctacggaacagcataattatcatccatcgatgtacttatcagctatattgcctctgattgcgcctcattgactgttttcagactgtcacgcggctctgcctaaatatcgtcatcagggccgggtaaccgcgataatgacggatgggttgaaagattcaccggcggcggagtctcaggcagagtgtgtatctgaccagcaccgatttcctcatacagatgctctgactccgatgcagataatgacggatgggtcgaaagatttaccggcggcggagtctcaggcagagtgtgtatctgaccagcaccgatttcctcatacagatgctctgactccgatgcagataatgacggatgggtcgaaagatttaccggcggcggaatctcaggcagagtgtgtatctgaccggtaccgatttcctcatacagattctctgattcaaatgccgataatgacgaactcagtgaaccctgtcccggtgatgaaaccgaatcataaacattcccgccactgctctcataaatatcattatcaaactgaatatcaaccggtaacggctgcgccggccgtgaagacatatccatcacaatttctctgtccggtttatcactgccctgctgtccgctgagatgcagaccaaatgatgacaacataccagaaacagcggatttaacggcattccatgcatttaataaaacggatttaatcccggatgaactgacatacgatgatgagctgttactgcccgctgaaccgtaaatatcattgttcagggtctgaatcgcctgatgtccctgtattggtcccatagtaactccctctgtgattagtgaagatccagcaggtaatccgctgactttaaaatatattcaaataattcaataatatggctatcttctgtaccattcagtgacagacgactccagatcacccactcatttttctcattcagggaaatcaccggttgcccggaaagctgtgttaacgtattcagcttcaggactttctgcagtaattcattattttggttaatgtgtggtaattccccggcatttgctgacagataccagtcagtctcatcaatgacggccagcgataatgaataccggctgtcaattgttaacataaatgtatgctgatcagcagcgggctgaggggcgtcaagcctgatatggcgcagcagcatcatggctgtgcggtgaaacggggataaatcctgcatctctgtttcctgattaatgaaatgatgatctcatcatgacaaaccgtcattactattactttcatatattattcatattaaaaatttatttcataattggaatataatcaggagttataaaaaatccatgatctttcttttattaaagaaattattttaattaaaaataaaatcattggttttacatatggaaggaaatcataaaaatgaatttagttaacaaactatccggcactcaaagaataatcccggaagaaagcaacctgaaggacatgtcaaaaataccttttctgaaaaaactactggatcggttaagcgcaccgcaaaatacgaatgtcaaacttacaggaaactacgtcaatattgatgtcgacaccacaactctgagcaggcagatattatcctttgtttataaatcagaactctcaattcccggcgccggaaataaccacgaaaaatcagaaaacagacaaaaagaaattaatgatggtgtgaaaaaatggcttacccaggaaaaaagtatcataccggtaaatattatcaaacgggaagttgacctgatgtatgcagagaaaaagcttgtgacaacaccagaagaactggacaaaataattgatattgttaaagaaaaacatctcggaaacaaagagctggaaaaacccgggattaactgctccactccgtccgttcttaagcttaataatatcctgactaacgaaattaatgagccggggataaaaaaacagttaagtcacgactttactaaaaaaatgcctgaaatgtcagataattaaaaaaaagaactggccaaccatataaaaaaaacgttaagtaatgatgaaacaaaaaaattaattgaacaatactccgcatataaaactgacatacttaacagtcatgataaactcacaacaatgatgacggggaaaatccggtcagatatatactacgcactgactgagaatatttataatacactgttatgtgataaatacaccgaaatgcctctggatttcagtgccatcagagaagagacaagagcacaggtactccgtatcgctgaagagaaaaaacacacatctcctgcaaaatcttccggctcagtagatatcgacgatatcgttcaccgttcatttgatttcagcacgagggtgacaacatcctatccggaacaggatattacccatgtcatggacatcctgaagcgaatgtcatgatcaacgcagtaaaacacgtttaataccggcccggttcagaggggctattcagccaatatcccctctgaatatcagggtttactccgcacacttatcatctccctgaaaccacaatcacgctacattccgctaacagtgattaacctaacaataatgaaataaatccatcttatccgcaggttactgctgggaactaagtcaaataagtgttattcctctcccgtacaattggataataacaaactgaaactactcctctttactcattcggacaggtgaaatctatgaaagcgttcaaacaacttgccggcgtgctgctcgcaattgtcggtgcctttgccctcgggtatatcgcactgaacagaggcgaacagatcaacgcgctctggatagtcgttgccgccgtctgtatttatctggtggcataccgctattacggactgtatatcgctgaaaaagtgctgaaagtcgatgcaacccgcatgacccccgcctttaaaaataatgacgggcttgattatgtaccgacagacaaaaaagtgctgttcggccaccactttgccgctatcgccggtgcaggcccgctggtcggcccggtacttgcggcacagatgggttatctgccgggcatgctctggctgctcgccggtgtggtgttagccggggcagtacaggactttatggtgctgtttgtttccacccgccgcaacggccgctccctcggggaactggtcaaagaggagatggggaatgtcgccggtgttatcgcgctgatcgcctgttttatgattatggtgattatcctcgccgttctcgccatgatcgtggtgaaagccctgacccacagcccgtggggaacctacaccgttgcctttaccatcccgctcgccttctttatggggatttacacacgctacatccgcccgggacgtgtcggggaggtctctgttatcggtctgattttcctggtgttcgccattatctccggcggctgggtagccgaaagcccgacctgggcaccgtattttgattatgacggcgtgcagctgacctggatgctggtcggttacggctttgtcgcggcggttctgccggtctggttactgctggcaccgcgtgattatctgtctacgttcctgaaaatcgggacaatcgtcggtctggcgatcggtatcctgattatgcgcccgatgctggaaatgccggcactgactaaatttgtcgacggcaccggcccggtctgggcgggggatctgttcccgttcctgtttattactattgcctgtggtgcggtctccggcttccacgccctgattgcttccggcaccacgccgaaaatgctggctaacgaaaaccaggcctgctttatcggttacggcggcatgctgatggaatccttcgtggcgattatggcactggttgccgcctgtgtgatcgacccgggtgtgtacttcgccatgaacagcccgatggcaatgctggcaccggccggtaccactgatgtggtcgcgtctgccgccagtgtggtcagcagctggggcttccagataaccccggaaaccttaaccaatatcgccaatgaagtgggcgaacagagcattatctcccgcgcggggggcgcgccgacactcgccgtcggtatggcctatattctgcacggggcgctcggcggcctgatggatgtctccttctggtatcacttcgccatcctgtttgaagccctgtttatcctgacggccgtggatgccggtacgcgctccgcccgctttatgttacaggatttactgggtgtgatttccccggcattgaaacggaccgattccctgcctgccaacctgatcgccaccgcgctgtgtgtgctggcgtggggttacttcctgcatcagggcgtggtggatccgctcggtggtattaacaccctgtggccgctgttcggtatcgccaaccagatgctggccggtatggcactgatgctgtgcgcagtggtgctgttcaagatgaaacgccaggcttacgcctgggtggccctggtgccgatggcatggctgttaatctgtaccatgaccgcaggctgggaaaaagtgttcagcgaagatgcccgtgtcggtttcctggcggtagcgaataaattccaggcaatgattgacagcggtaacatcccgtcgcagtacagcgcgtcgcagctgtcacagctggtgtttaacaaccgtctcgatgccggtctgacactgttctttatggttgttgtggtggtgctggctgtcttctcactgaagaccgcgctgaaagctctgaaatccgacaaaccgacggacaacgaaacaccgtacgagccaatgccggaaaattatcttgatttagtggcaaacagcaaatccgctcactaaaatctgatatactggtgaaataaggagcggcaggcaactgccgctcctccgtacgcaacaggttcagggtcataattatgtttgatactctcgcaaaagcaggacgttatctcggtcagaccgccaaaatgatgattggtgtgccggattacgataactatgtacaacacatgaaaaacacccatcctgatcagacaccgatgacctatgaagagtttttccgcgatcgtcaggatgcccgttacggcagcaaaggcggcccgaaatgctgctgagccgcacaacggcaatcatgtaaaaataccgcactgattgcggtatttttttatttcagcggcagtttttttcctgtaacgccgtcagctgactcaggcggacagtggcttttgccctggcatcatctttggcaatcccgttaccgataccgaaatctcccagaaatcccagcaccgttttgccgtcaaactgcccggttttttcaatttcctgctgaatgctgcgggttttggcaatttccgttttaatatcatgacagttcattaaggcagattcctcaccggataccgctgcggcctgcgggtattgtttggtggcacaggcagacagcagtaagacaaacgggataataacagcgatttttttcatggtatttttactctcagaaagaaaactcagaccataagaaaaaatgcaccggccggatatcaaataccggccttaaatccgcatatccataaaaaaaccgccggatttctgcggcggttcctgtgataatcagagaaactgactcactcgtcctcttcctcaccttcaaataacgtaaatccgcccagcccttcccaacccggcagcgcgtcataaacctgctgtacagcacgggtgactttctcattgaccggcatataaaacccgaccagatccggctgaatacccaggaaaatcacctccgggatatcttctttcagctgatcgataagaaagttgagcggcagattatgcgtgctcatgataaacatgtcagcgatatcatccgggtcaataatgcggatctctccgggattcaggccgatatccgccgcatccacaatcagcagacgttccggtttcagtgcccgcacctggtgcgccacattctccggtgcactgccgccgttaacggcaatccagccgtcaaccgggttcgcttccatcagatcagacagcatcggtcccgccgcatcatcccccatcatgctgttaccgaccgccagcatcacattttttgcagtggtttcactcatgggcggcgcttcactatcaggtaaattgccggttcacgctcaatttcccccagcaggcggataagcgtggcactccattcgcggaagtccggatttttatccttcgtcagcggatccagtgccagtgccagcatgttggtatgcgtggagtcgatattgatttcaccgaaggtgataagcccctgcaatttgcggcgcgcctccccttcgggaagcgcattcacccaggactgataaccgctgagcgggcagatgagctccgtattcagacaatcgatcatgccaacgtggtggccgattgccagcgagtagtacatcacctgctgagcttcttccggaacatcagtatcactgtcgacaaatttctgtctcagcgaccagaagatcacttttccgtcagtacctgcatgatcgggtgtctgttcaggcatgaatgcctccttgttgtaatacggtcaccagacggttcacaatttcgcgcagacgcggatcctgctcttcatccatccaggtctgcattgtgcctttcacctgctccggtgtggcattttccagcagtgtcaggaagcggtcgctgatttcgcgcccctgataatacccggcctggcggcgtgcctcacgctcaatcatcacgcgggttgccagcggaatggaaggcagcagcagctgaacgcgctcattgtcttcctcgacatgatcctgacctttcagtttctggttcagcagacccagagccaccgcaaaaccgtagatggttgcagccggtgtcggcgggcagcccgggatccagacatcaatcggcacgatgtgctcgctgccgccccagacacagtacaggtcatggaagataccgccgccgcagccgcaggcaccgtaagagatacagattttcggatccggtgcggattcatacgcccgcagtgccggcatccgcatagcgcgggtcaccgcgccggtaaacagcagaatatccgcatgacgcggcgaggccaccactttgatcccgaaacgttcggcatcaaagaccggggtaatcgcggagaaaatctcaatctcacagccgttacaaccaccgcagtccacacggtaaacatacgctgaacgtttgatatctttcagcagcgtgcttttcagtttcgccacctgctcatccatcttcagcggttcgctgacatgatggttcaccgggatttcaggcaaactcatgatttttctccctcaatatgcagacggaagttctgacggtcattgttcagcaggttatttttctgcttacaggacggacaggtttcatacatcggccgcaatgcttcaattccgctctcttcaacacctgacgccaccatcagcgccatagcatattccacggattttttcggtgcgaaggcttccccgcactggcggcagtgctgtaagcggaatgtccctttcatatagagatccgccttgttcatcaccgccgtttcaaactcctcggtcagatggatagctctggtcgggcagacttcctcgcagcgtgcacaataaatgcagcggccgaggaataactgccagcggcgctcaccgctttccaggtcagtttccatcgtcagggcgtttgccggacaggcagaaatacaggcaccgcaggcgatgcactgttccggcacatattccggcttaccacggaacccgtgcgccacttccagtggtttgaacgggtatttgattgttgctgtccccgcattgcggagggttttaaacagtttgaacatggtattccctccggcttatttcagcggtgaatgtttgcgatcgatgctgtactgctcgatctctttgtacgccacagttttcgctttgcgttttttcacatccaccagcgtcacacggtcagtacaggagtagcaagggtcaaggctgccgataatcagcggcgcatcggaaacggtattgccctgcagcatgtagcgcagcaccggccagttagcgtaagtggccgcgcggcagcgccagcggaacagtttctggttatcacccagcatgctccagtggatatcttccccgcgcggtgcttcggtgtaacccagcgcaaatttgtgcggctgataggtaaagccttcggtcagaatcggcccttccggcatgttatccagcgcgtattcgatcatggacagtgaatccagcacttctttgacacgcaccatcacacgggagtaaacatcacagccgtccatggtaaacagggttttcggcaggttaccgtaatcggcaaacgggtggtcgaaacgcacgtcacgggcgaagccgctggcgcggatcatcggcccgaccgggctgtaatcacgggcaacctgcggatccagacggccgacaccgacggtacgctgttccatgttcggcgtgctcagcagcatatccaccagctgagtgacatccgcacgcatctcgcggaccagctgaatggttttcacccgctgctctttgaggaagtcacggcgcacaccgccgatcaggttggtaccgtaagttttacgggcaccggtcagcagctcagccatggtcatggatttttcacgcacacggaagaattgcataaagccggtatcaaagccggtgaagtggctggcaagaccgatgttcagcaggtgactgtgcagacgctccacttccagcagcacgctgcggatagtgtgcgcacgctgcggcacataaatccccagcgcgttttccacggatgtggtgtacgccacgctgtgggtaaagccgcagatgccgcacacacggtcagacaggaaagtgacttcgttataccccatacgggtttccgccagtttttccataccgcggtggacgtagaacatacggtagtccgcatcgacaatccgctccccgtcaacaaacagacggaagtgacccggttcatcagacgtgatgtgcagcgggccgattggcacaacgcgcgcatcttttttgctgtcgttgataaactcgtaagtttcggtatcggtggtcggtgccgggcgctgacggtaatccatggtgtctttgcgcagcggatagagatcatccggccagtcatccggcagcaccagacggcgctcatccggcagacccaccggacgcagcccgtacatatcgcggatttcacgctcgccccacaccgcagcaggcacgcgcggtgtgacagacgggaattcctgggtgatcgggctgacatacgccttcacggtcacccagcatttttcaccctcttccatagagagtgcatagtaaaccgcgaactgcccgttaagcggacgctcatcgttaccccacagcaccggcagccagccgccacagccgtagtacagaaactccaccacttccggcagcatttctgttttgatggtgatggtcagctggttggcagtctgccactcttcttccagcaccgcatggggaaatttctcgcggacctgtgccagatagcccgcgcctttacgaacgccctgaagggtatctgtgtaattctgatagctcacgtttatttctcctgcgatgatgtggatgttgtatcaacaccccacggccagcggtagtccggggtggttaattctgtacctggtaatgcactgtccgtcaggacaatagtggcggcattttcgagcagacggctgaccggctgcggaatgtgggtgcccatcaccagcatcagtacaatgaggatggccatcggcaatgtcgtcaggatccctgcctcgccgcgtgacacgcagtcaggctgtgcgccgaacagggttttcgataccattctaaccaacccgccgaggacgatagtgagcaggatcaaaagcagcagcgtcagccagaaatgatcagccgccagacccgcaaccaccgtcataaactcactcaggaacacgttaaacggcggcataccaccgagtgccagcgcgccgcccgcaaagacaactgccgtaaacggcatggtgcgcagcatccctttgaccaccgtgatatcacgggtgccgtacttcagtaacacgttaccggaaccgcagaacaacagggttttacccaggctgtggttcagtgtgtgcagcagtgcggccagcacacccagcgggccgccgatacccagcgccaccgcgatcagccccatgttttccacactggagtacgccagcaggcgtttcatatcacgctggatcaggataaagaatgccgccacagccacagagagcaggccgaagaccagcagcagtgtttgtgtgaattccccgccgatagccgaggtgataatgatgtagtaacggatgataatcagcagtgcgcagttcagcagaaccgcggacagcagcgcggagaccgggctcggcgcctcactgtgtgcatccggcagccaggcgtgcatcgggaacagaccggttttggtaccgaaaccaatcagcacaaacacaaaggccaggtgcatcagggtcggatccagcagcgcggtatgtttcagcacttcggtccagaagatagccagttccggatccggcatcacactcgccgcattcgcatacacgaggatggtgccgaacagaccgaacgccacacccacactacagatgatgatgtatttccacgccgcttccagggaagagcgctgtccgtagatacccaccaggaacgcagaactgagtgtggtggcttctactgccgcccacatcaggatcaggttgttactggtgatcaccagcagcatggtgaacaggaacagatggaagaaaccgtaatagttacagagtgttgccacactcacttcaccatcattcacttcgtggttcatgtaaccgatggagtacagaccggtcaggaaaccgacaatcccgaggatcgccaggaataacccggccaggctgtccaggtggatccagcggttcgccatcagcagatcaccttccgcactgatggtgtacaccatccacagcgagaagacgagcatcagggagataccggtggtatgcaccagggtgaccacacctttcgccccgccgcctgccaggcggcaggcaaatgccagcagtgaaatcaccagcggcgttgccattaataacgttaacaacatgatttgactcatctcatcaccccttcagcgcggtcagttgatccacgttcagtgtgttgagcgtgcgatagattttacgtgccagcaccgccatgataatcacagcgaaaatggcgtccgtcgcgataccgatttccaccagctccggcgctttatacgccagcagagccagtgtcaggtgcgatccgttttccatcaggcaataaccgaatgcctgtttcaggatgttgcgctgtgtcacgatgcagagtaagcccagcataaagtgacccagggaaaccgccagtgccggtttcagatccgccaccatcggcagtttcaccggttcgaccacaaaccagcacagcaccacaatcaccgccgcagccagcatcagccaggccgggcttatcacgccgccgttggcggtcggatcagacagtttgcggaaggcatagcccataatcagcggcaccagcaccactttggtcgcgaaggcggtgatcgcccacatgcccagctgcggtgcatccagtgtctgtgacaacgtggcgaaaatcgccaccagcaccagagactgaagtgcatagaaccagcaggaagccaccgggcgcttcgccccgatgaccagcagcgaggtgatcatcatcagccccgccagattgttcacaataatggaaccagtcatactttctctcccttaaccgagccagatgacggcgataacacttgaacagaacgacatcacaatcagcaggccgataacccactgcattgctgccggaaccggagttccgtttgccacgtcttcgctcggctcgcccggcacaactttgccgaaccagtagagcagccaggcaaagctggcaacagattcaatcagcaccagcaccatgattggcgcgaagatccagaactgttcagataacgcgaaaccggccgcgaaaatcgggaatttactgaagaagccgttaagcggcggcaccccggcaatcgccagcgcagccacacagaaaccgacacccagcagcggatagcgttttgacagaccacgcagacgcggcagcatacgggtcccgcaactgtagctgagcgcaccggccaccaggaagaacagactcttggcaaacgcgtggttaaagatgtacgcgataccgccgtcaaaggcttctttggatccgaaaatggacagagacagcgcaaggaagatatacgccagctgggtaatggttgaccaggccagcagtcgtttcatatctttctgcggcagatacatcataaaaccatacaccagcgtgataacggccatcaccacgccgacccagccgatgatttccggcacatggtcagaagacatgatgctgcgggcaaagatgtaaacgcccactttcaccatagacgcggcgtgcagatacgcactcaccggtgtcggcgcttccatcgcatccggcagccaggcctgtaacggcagctgggctgatttaccccatgccgcaaacaggatcccgccgaagacgatcaggctttgtgcctcattcagctggttaatcgcgctcagggcaaacgtaccggtgctgataaacagggttgccgccgccataaacaggccgagggaacccacgtgtgtgatcagcagcgctttcattgcggaacgctgggctttttctgtctggtagtaaccaatcagcgcccatgaacagccaccggtgatttcaaagaacagtaactgccccagaatcgtggatgacagcaccacgcccgccatcgcgccgataaaaatcagcaggaaggcataatagcggcgggtcggcccgtgagcgtgctcgcggttaccttcagtcaggtagccggtggagtacagacaaatcaggaagccgaggaacaccaccgcaaacgcaatcagagtgctcacgccgtcaacggtaaagccgaacagcgcgatattaccggcctgaaccagttccagtgtggtggcggtcttaccgccgtcgagatacagccagcccagtgccgccgtaccgagagaggccagcagcgcgactaaggtactcagccacggggccatgcgcgtcggcaggacactgaccagcaacgccccggcaaacggaatcagcagggtcgccagtgcaatattttctaacatgctttatcgctccttacagaccggtgagatagaacacgaatccgagcgcagccacgccgaatcctaaccaggtcacatgatgcgtcagcagaaaacgaccacgggccagactgttttcgaccagcgatgccagaacgaaaatcaccagcagttttaccagcatcagtcccagcgccagcagcagactgcctgcggtcagaacggatgcactgccgaacgggaagaaaatcgagagaaacaggactgccacaaccacctgtttcagaccgatcccccatttcaccagcgccagaccggaaccggagtactcggtcagcggcccttcctgcagttcctgctcggcttccgcgacgtcgaacgggattttgcccatttcgataaaggtcgcgaaaccgcaggccagcatggccaggaaagtggcggtcggtgatacccagccctgactcattacggcactgatgctgccgatattggtcgaaccggcgatcagcgcaaccaccagcagtccgaggaacagaatcggctccaccagcacgccgagggtcagctcacggctggcaccgataccggcgaacgggctgccggtatccagaccggacagggagaagaaaaagcggaacagcgcgaaaatatataaaatgatgatgaggtcgcctgccccgctgaacagtgacgttgtggtaacaaccggcagcgccatcgccagcagcagcatgctgctgagcagcacatacggcatcacccggaaaataaacccggaatcacgcggtgccacggactggcgtttcagcagtttggtaatgtcacggtaatcctgcataatgcccggcccctgacgggagtgcatttttgcgcggatctgacgggagatgccggtaaacagcggcgtcagcagcagcaggaaaatcgcctgaaccactgcgaagagccccgtcatcaatgtaggtgtatcctgaatcgacatggtttctctccttacgccgcaatcacaacaagcagaacgaccagcgcggccacgacatacagacagtaaagtctgaaatccccgccctgaaggcactgaatgcgtttggcgaaacggttaatcccgcgcaccagcggataaataatgcgttcatcccagaatggctcgacttttccggccccggctttggtcacgtctaaggcgtgagccagacgggctgacggatcaagctgtttgcgcatgcggtacagcggcgcaaacattgagcgcagcggctgggtaaagccaccggcagatacggacatatcgcgttcccaggcataaccacacgcccaggcgtcgcctttgcggcggaagttcatctgtttgcctttgaagaccagatagatgatgaacgggatcagcggcagtgccagcagtaacaggaatgtcatagccggtgaaatcatggcctgagcagcggaatccggtaccagcatcgcgccctgtgccactgtcacatccgtgcctgcggtcagggtcatcgctactttcgccagaaccggtgcaatcacactcgcaccgacacccagcagcacacacaccacggccagaatcagcattgcggcagtcattgtccacggcacttcgcgggcatgagtggcggcttcactgcgcggaccgccgcagaagctgacaccgtacactttcacgaaacacatcgccgccagtgcaccggtaatcgccagcatcacaattgcaatcggaccactgattttcatgatgaatgtgccgtcatggctcattgagaacagtgactgataggtgtaccactcactgacaaagccgttgagcggcggtaacgcggaaatcgccatacaaccgattaagaacgcggttgcagtcagcggcatcagtttggcgaggccgcccattttttccatatcacgggtgtggatacggtaaatcaccgcaccggcaccgaggaacagaagacctttaaacaccgcatggttgagcaggtgataaatcgcgccgagcaggccaatcgtcgccagcaccggcatatcattcgccatgccgaccattgccacaccgacacccatcaggataatcccgatgttttccacggtgtgccacgccagcagacgtttgatatcgtgctccgccagcgcatacataacgccgagaacggaagagaccgcgccgaagcccagtaccacgataccccaccagccctgggttgcacccagcaggtcgataccgactttaatgatcccgaagataccgattttcaccatcacaccggacatcagtgcggaggcgtgagacggtgcagccgggtgagcctgcggcagccagctgtgcagcggtaacatacccgctttggcaccgaagccgaagaaacccagcaggaagaccacagaggccatcgccggagacagtgagagctgacggaaggaatcgaaatccagactgccgctttcgcgccacatcaggaagaaagcgatcataatcagcacagaaccggcgtgggcaataaagaagtagagcagaccggcgcggatggatttgtcatcctgatccgcgatcaccaggaaccaggaggccagcgacatcatttcaaacagaatgatgaaccagaaggcgttgtccatcaccaccagggcaaccatagaggcgataaacaggttcaggaagaaacccatgctccacgcgccgcgtcccagatattcctgcacatagttcagggaatacagagcgctgactgtcaccagcagcgaaatcaccatcaccataaaggcggcgaggctgtcgaggcggacgacaaaatgggcgaacgggaaaggtccctgagcgaagaacgtcagtgtttcgccgctcatcagcaccggaacggcgctgaataaaccgaggatcccgccggcaatcgccgtgatcccggcaacatacactgccattttttcctgctgtttaaacagcagcgaaataaaaccgccggcggtatacagggcaacggaccataagagtaattcaagagatgtcattttctgctctcctgtcctgagacgaaaatgtcgaactccggcggcatcgcatcgacagacgcggtacgacgtttcgcactttcgttttccagctgattctcttcaacgagatggagggcatcggtcgggcacactttcacacacgccggtccttcttcactgaaatcacacaaatcgcatttcaccgcgatattacggataccggcattccatgccaggaacgggttcatggtcggcagactgtccggcacatccagcagcatctctttcggcacatactgctcaaagaaatccggcatatcgacaggtttactgcctgacggggtgatagccccgaacggacagaccagaccgcacagtttacagccgatacacaggctttcattcagcacgatcatgtcattttcgtgtgtaatggcattcaccggacacacacgggcacacggagcatcatcacactgacgacaaagcatcggcgcggtcagttccccgattttcaccacattcaatctcggatgtgtttgtaatccctgctgtttatgcgtctcagaacaggccgccatacaggtattacatccgatacaaagatgcgggtcggcaataacaaagcgattcattcgccccaccctccagaaaaatcagacgagtcatatagtttgatacccttgctaagcatttttcatgccatgtgtaaaaatggatatttatcagtatattgtcgtaattttcaggggcggataactgtcggttcgacactaatgacgacaaaaatgtcatgcggtctgctgtcatcagttatgatgcagatgattaatgaataaatattgaaccaagtaaccgatcgtttctctaactctctttagcgatgaagtgatgtacccgatgccaatacgtccgttattaaacacactaagaaatgaatttgttgtttctgctgttcttgccctgtttctgggcttttttctcaactacaccgtgtatttttcccgtgctcagaaccagttattactggccggagactatggttccctttatctgattgctgaaatttttgccaatgttctgttcagcttcttcttgttccggctcattgcccaaaccggattactgagttttaagattctgagcagctttattattctggtcagtatcgctgtcagttactacgtgatgttttatgacgtgattatcggttacggaattttagtttcaacgctggcaacggacagtgttgaactgtcacaggaagctgtcggcgggcatttttatctctggttctcactgctttccgttccggctttatttctgatctggtcggcaaaaaaaacaagcatacaaacggcatcacgccgccgggcactcgctctgtttacgtttattgttattccggttctgattttcggttatttaaaactggcggatgccaatcagaaaaaaattgaaatgaacggcagtattgatgtgtcgagttatggcggagagctgagttactcctatttaccgaccaactggattgtgccgctggtacagtatgcggtggtcaaatatgacgatacctttaatgaaattgatttattcgacccggccgatgaatttacttacactccggcgccgcagaatgacgatttatatgtggttttcgtgataggcgaaaccgcccgctgggatcatatgcaattactcggttatgaacgggaaacaacgccattattatctgccgataaaaacgttatcgcctttaaaggtcagtcctgtgatacctccaccaaattatcgctgcgctgcatgtttgtgcgtgaaggcggcgtaaaagataacgaacagcggacagttaccgaaaataatgttttctctgtgatgaaacagaacggcttttattccgagctgttttccatgcaaagtgaagtctggttctataaccggctcgacctggataattatctgatccgtgagatgatcaccgctcagaacagaacgccgggcaaagctatccgtgatgaattactgatggacgaagttgatgatatgctcgcccgtaaaaaacaggggcagaacctgattattttacataccaaaggctcacatcatctttattccaagcgttatccgcctgagttccgcaaatatatgccggaatgcacagaggaaggaaccaaatgcagcatacaggaagagatcaatgcttatgataattcgatcttatacaccgatcactttctgcatgatctgacagaaaaattaaaagacaaaaatgcgattgtcttttatacctccgatcacggggaatccctgggcgaaaataacgggatgcgcctgcacggtacgccacggcatattgccccgccggagcagttccgtgtgccgtttattgtctggatgtcagataactacatcaaaaataacccgtctctgtttgataacctgaaagaaaacagccggacgcggacatttttccatcatgaattattcgataccattctcggctgttccggtgtgacatcatccgacggcgggattaataataaaaataatctctgctatcggtgatacagtaacctcatccgctgatacagagagagaatttaaggatgagaaaaacagttaccctgctggcgctctgcctgccgctgtccgcagcaatggcagacgacagcagttgtacggacgcgcagcgtcagctgaaccgggaaaatacctatattatcaccggcctgtatctgaacgggccggtcaaatctgtggttaccacacgcaataacaaacaaaaatcttacggcagcagcgaaaccaccattacattgtcaccgtgcggtgccgtgacgcagtatgagcagcagatgtactatctgataagcccggatgtttaccggaaagaacagtacaaaacagatccggataatccgcttcacctgaccggcacagcagaatacaaatttcacggtaaacacattaattcacaaacagacatcacccggacgataaatgataaaggacagattgccggctataccttactgaataaaaataccggtgacgatgaacaggaggatgccgttactgcccgtatcaattgggaaaacagccggctccacagtatggatgaggtgaaaacggacggagaaaaatcagaaagtctcttttaccgctatgattcacaaggccgcctgtcacacgtttcccgtggctccggttcctcagagacccgctttacttacactgctcagccgtggccatcagtcactttaatctctatttacagcggcagcgaactgctgaatgtactcaccgaacgttgtgaacaatgggatcatcacggtaactgtctgctgcaaaaaaattatatcgccgattattacggctattctgcggatgacaatccggagccggtcttacaaaccattcagcgttaccgttatgaatattactgaatataaaaaaaccgccgctgattcagtggcggttttgtaattcatcacgtaatcttatttcacgcgggaaacgtattcacctgaacgggtgtcaactttgatcacttcaccaatctgcacgaacagaggtactttaaccactgcaccagtgctcagggtcgctggtttaccgccggtaccggcagtatcacctttcaggcccggatcggtttccgtgatttccagctcaacaaagtttggcggggtaaccgcgataggacggccgtcccacagggtaacgatacattcagcctggtcgatcagccatttggcgttatcaccgatagctttctcatccgcagccagctgctcgaaagtttcgttgttcatgaagtgccagaactcaccgtcgttgtacaggtaagtcaggttcagatccatgacatcagcgccttccgcagagtctgttgatttgaaggttttctccagcagtttgttggagatcagtttacgcagacgcacacgggcgaatgcctgacctttacccggtttaacaaactcactttcaacaaccacgcaaggttcgccgtctaacataattttaagaccttggcgaaattcgttggtactataagtagccatggaaatcctctaattttaaataaatggcatagccaaaaaaatggtcgatattgtaacccaaaaacaacccgcccgagaagtctggctgcatcaactcactgattctgtcactaacccaacagaactgctggcaatattaggtctggaacaggacgaaaactggtgtgccggtactgatgcccgccggttgtttgctctgcgtgtcccccgtccttttatcgccaaaatggaaaaaggcaatccgcgcgatccgttattacttcagaccatgacacacagggctgaatttgacctgaccccggggttctctgacgatccgctggatgaacaacatagtgttgttccgggactactgcataaatatcacaaccgggcattgctgttagtgaaaggcgggtgcgcggtcaactgccgctactgtttccgccgtcacttcccgtatgaggacaataaaggcaccagacataactggcagcaggcgctcgattatatcgctaaccatcctgaactcaatgaaatcattttctccggcggtgatccgctgatggcaaaagaccatgaactggactggctgctgacgcaactggaagcgattccccatattcagcggctgcgcattcacagccgtctgcctgtcgtgatccctgaacgcattacgccgggactgaccgcgcgtttccgcgattcacggctacagataattttagtcacacatatcaatcacgcgaatgaaatcgacgatacattgaaagaaaaaatgaatcagctgcgtgaaagccgcgttaccctgctcaatcagagcgttcttctgcgtgatgtgaatgacaatgcagaggtgctggcacagctcagtaatgcgctgtttgacgccggtattctgccttattacctgcatgtgctggataaagtacagggtgcgggacattttctgatcagtgatgatgaagcccgccgcatcatgcatgatcttctgccgcgtatttccgggtatctggtgccgcgtctgacccgggaaatcggcggtgaaccgagtaaaacgccgatcgatctccgtctgcgtcagagctgagtattaccacgtaaacacggtcatctgaagaaatagtattttacaggtaacttcagacaggttaaattgcgtacattatgtattatggagtacaaaattatgacggattttttaacctcaaaccaggccgcgtgggataaacaggcggaacaacaacaggcgtggtcaacaccggtcagcgcagagctgattgcggctgccaaacaaggaaactgggatgtgcatctcaccccgcagccgctgccgaaagactggctgggggatgtaaaaggtaaacgcattctctgtctggcctctgccggtggtcagcaggccccggtactggctgccgccggtgcggatgtgacggtgtttgatttatcagataaacagcttgagcacgatcgtcaggttgcccggcgcgacgggctgacacttaaggcggtacagggcgatatgcgggatctcagcgcatttgcggatggcacttttgactgcgtgttccatccgatttccaatctgtatatcccggatgtgaatccggtatggcgtgaatgccaccgcgtactgaaaaccggtggtacactgctggccagtttctttaattcagtggtctttgtcggcgatcgtgatgcgaaataccgcgaagaaggcattataaaaccagcatataaaatgccgttttctgaactgacagcattaacaccggagcaactggcagagaagcaggcacggcaggaagcttttgtgtttggtcattccctgacagatttgatcggcggacaactgaaagccggttttcatctgacagatttttatgaggactggcaaccgaacccgcgttttgttatcgataattatctgccgacatttattgcgactgcggcagtgaagattggctgatttttcatgcgtttttgtaaatacagatacaacaaaccgtgattacagtgccatgctgataaccggtaaaagcacaaagtcgctgtgaatactttaagactgtgattacggtatctgcaccggtaacaggcaaaaacagaaagacgcggtaaacacatccctgttatacgctaaatcatttcgctcagagcaaggcggcaagtgaaggggcacggggagcatacaccagtatgtgacccgggacactgagtgcggccaacgcggctatgggcgaaaggatgacgcgtatacgctcaggcgcgtcatccatggcccgcatgctttctgttttctttacccgccgcccgcgcttttcacatctgaataaaaaaaccaccgtttatattgacggtggtttttttgtatctgactcagacaatttcgctaaatcattcaatctgcagcaaggcggcaaagtgaggacatccggggagcatacaccagtatgtgacccgcgtggccgaacgaagccaacaccgctgcaggttgaaggatgacgcgaattcgttaaattatgggcacttaaatacctgccccgtcagcttgctatccaccgggatcaggctggacacaatcgctgactctgccgggctgccgagaccataaatcacgttaccgcccatggccgcagctttgttacgcaggtcatttgccgcaccgcgcatggagctgctttcgttaccgacgccggtcatccagttgctctgtacaccggtaacttcacctaatttctgacattctgccggtggctgctcttcggaaaagcggacctgtgatccggcggagctcagttcgttcgtggtcgtacagcctgccagtaataacagtgccagcgcaccgggtaacattttaatccgcatagttttcctcattcacggttggaaaaaatttatacagctaatttaaccactttgtggcagcgacttcaaaaactaatcgctgaaaaccacccgctgatcgcaatcagccacaaattatgcataaaaaaaccggcacctgagtttcctcagagtgccggtttggtttttcctgtgtcagcccggtaatttactgatagtcttttttaattttctgagcggcatctgaaccgcgtttcgcttctttttcggcgatttcgacagacagaccaatatacgcgcgcggatctaacattgctttgatttcttcattgctgaaggcagcggtaatagtgtcgtttttcgtcaggtttgtgtagaaatcctcaccatctgcagcggttttaatcgcttcctcatacaataatgaatgcgccttatccttacccagcttttccgccattttcatcatcacgtattcggtgttatccagccctttgtttctcatgacgttgtgcagcattctctcttcatgaggtacgatggttctggtgagctcttctgttctcagcagcacttcggtggtcagttcgagtgcttcctcgatcagtccgtcgaataacatataagagctgctgtcaccctcatacggtctgacggcggagtacatgccgacacccggcagtgagtacagtttctgggagttcgcgataatacctttggccagtttcgggttaattttgtgcggcatggtgctgctgcccacggtacccttggtaaagccttcggaaacttccgcgatctcttccagcgtggtgctgtaaacttcctcaccgattttgtggcagatattcgccatcagcgccaggttcgccatatattccagtttatgggtgctcaggttgcgggacggcacttccatcgcatgcatgccggtcagttcagcaacccgcttctggacttccagcccgatgcccggcatggtgttaaatgccccgaccgcgccgcccatcatgatagtgaatacacgcttttcacactctttcatgcgctggctgcaatcaataaaatcgctgatccacaccgccactttgtagccgtaagtgataggaatggcgtgacggccgtgtgttctgcccggcatcaccatgtgtttggttttttctgcgagacgcgataaattttcgaggatctcgcttaacagcagcataaatttattatgcactgtcttcatcatatacagttgcgaactttgctgaatattctgtgtggtaataccgtaatggatatatttaccactctcttccgagcaggcattcactaatacttttaaaaacggtacgaagccatgaccgattttctgatagatacggctcatctcttcaaaatcgatattctcaataaccgccttttctttaatttcatcggcagcagaccggggaataaaccccagttctgcctgtgcctgagctagcactgattcaaacatcagccaggtattgtatttggcctcatctgacagcagcgcttttatgccgcggtcatcgatggttttacttttagaatcatataaagctctcatcatatatccttttatttcttcattgcttcatcaacagcgttgcggacaaattcaaccttcggtccgtaaacaacatggacgtggtttgccgatggaaagaagaatgcagtacatcctgattccgacattaactctttatcaatcttattcacttctgcgatatcgatacgcatacgggtaatacagttatcaacgttacggatattttgttttccgcctaacgcctcgataagaatttccgcaatttcaccataacgtttttctttaattaacgtgtttttcagattgctggattcttcacggcccggcgttttaatatcaaaccggaggatagcccagcggaagataaagaacgtcaccaccgccagaccggtaccgataagcaccaggaatatccagttagtacgttcgtacagcaggccgaaaatcgtgaaatcgaagatggttccgcggatataaccaatcgcgacaccggcgaatgacagcaataccgcaccaatacccacgatgatggcataaattaaatacagcagcggtgcgataaacacgaaggtaaattcaagcggttccgtgacgttaccgagcatggcggtcagtaccatcgtcaccagcatggatttcacttccgcgcggttctctttcttcgatgttttatagatagctaacgcgattgccgggaacaggaacagcgtcaccagcatttgctgctgcgccataaagcgcgtcaggcttggcatcatcgcccagtattcagttccggggccctgtttgaataacacttcagtcagcgccggaacaacaccgacataggtttgtccgtcaatcacataggtaccgccggcttcggtaaatctgaacagcacgttccagacgtggtgcagaccgaacggaataaacagacgctcaccgcccgccgtaaagaacggaccgacaggactcagaaagacagcagagagcttcatcagcccctgaaccagcacttcccagataaacggtaatgtcgcgccgaccatgatcatcaggccgaccatgatgatggaaacggattttttaccggagaagaaagcgaaggcagtcggcagttcaaggttgtaaaacttgtccgttgcccaggcggcaatcagaccggtaatgatccccccggcggcactgatatttaaggtttggatccccagaaccttaatttgccccacctgtcccataatggccggatcagccagtttgccggtgagtaccagccagatattcatggtgataatcagcgacaaataccccaccacggaggcgaagaccgcgatccccttatcacgctggctcatcccgtaggcaacccccatggcaaagagcagtggaatattgtcaaaaataacgcccgcaatagagcggatactgacaagcagtgcgttaaccgtttcatttccgaggaaaggaaaccgggcaatcatgtaggtctgcactaatgcaccactgatccccagaatcatacctatcggagccaaaaccccgattggcaggagcagtgtccggccaaagcgctggatcgactctccgaattttcttttagccatattattttccctgcgacgaagaatattgatattacccggaatactagcactgcgtttttgaaatgaaatgatggtacggttttaaatattatctcaggtcttaaattatgacccgggtcattctaaggcgataatgatttaaaaatcaggatgataataatttttaagacgttctgttaatgattttctgaataaacgattattttaaaaaaagcaggaattattgaacaaaaagcattcaattcaacttaagctaaataatgagtttatttacagcaaactttccagctcattaattaataaatccaccaggataaaaaaccctgttctggactttgagtcatcccgtttggtgtcataactgtcagagaagcaaaagagtgtgttatttgcgtatgtggtcagttcattcgtgtggaaggcagtcatactgatgatatgggcatctttcagctggacgatttttgcggtttcaatgatctttttagttccgccggaaagggagataaaaatcacggtgtcatctttgctgacaaggcgggtaaaggaatcagaaaggttataatcattaataaaaaagcagtgcagtcccagcgaaaataataaatgctccagatagtaaccgactgccttgctggttccccgtgccaccagaaagatattccgtgaaccgcgcaatgtttttgcacaatcgcggatctgatcttcattaatcagtgtgaaggtcttatgaatattattctcgagctgctttttataggatgccggtgcttttttctctgctttattttgtgagaggatatgattgttaatctgaaatttaagttctttaaacccgctgaaacctaatttctgagataaattgataatcaccgttttggacacaaacgttttggcgactaattcattaatatttaaccagggaatatcggcaatattttccgtaagatattttaatactttcttctcactgacggttaagttgtcgtaattcttcagaaaatccagcatatccggcactcccccatttcagcagcggtatctctcaataatacctcataatgatgataaacagtgggatattataaaatacaaaccggacagacaaaaaaagcccgtaaccaatcaggttacgggctttttcagcaaacaattgcagtcagactacatgattacatcatgccgcccataccgcccatgccgcccataccaccggctgcacctaaatccattttgtcgtctttaggcagttcagtgatcatcgcttcagtggtgatcatcagacccgcgatagaaccggcgaactgcagagcagaacgggttactttagtcggatccaggatacccattgcgatcatgtcgccgtattcttcggtggctgcgttgtaaccatagttacctttaccgcctttcacggtgttaacaacaacagatggttcttcacctgcgttttcaacgatctgacgcataggtgcttccattgcgcgcagcgcaacacggatacccacgttctgatcttcgttatcaccggtcagggcagtcagagcagccgcaacgcggactaatgcagtaccgccgccggcaaccacaccttcttcaacggctgcgcgggttgcgtgcagagcatcgtcaacacgggcacgtttttctttcatttcaacttcagttgccgcaccgactttgataacagcaacaccgcctgccagtttcgctacgcgctcctgcagtttttcacggtcgtaatctgaggttgaatcttcgatctgctgacggatctgaccaacgcgtgctgcgatagtctcttcgtcacccacaccatcaatgatagtagtggtatctttgttgataacgatacgttttgcctgacccaggtcttccagagttgctttttccagctccataccgatctcttcagagataacagtaccgttggtcagggttgcgatatcctgcagcatcgctttacgacggtcgccgaagcccggtgctttcaccgcagccactttcacgataccgcgcatggtgttaaccaccagtgttgccagtgcttcaccttcaacatcttctgcgatgatcatcagcggtttgcttgctttggcaacgccttccagaaccggcagcagttcacggatgttggagatttttttgtcgaccagcaggatgtacgggttttctaactcaacagaaccggtttccggtttgttgatgaaatacggggagaggtaaccgcggtcgaactgcataccttcaacaacatccagttcgtcttccaggccggtgccttcttcgacagtgataacgccttctttaccgactttatccattgcttccgcaatcagtttaccgacagtttcatcggagtttgcagagatagtacctacctgcgcgattgcagtggtatcagagcatggtgcagacagttttttcagttcttcaacggctgcaacaacggctttatcgataccgcgtttcagatccatcgggttcatgcccgcagcaacggctttcaggccttcagtgatgatagactgagccagtacggttgcagtggtggtaccgtcgcccgcagcgtcgttcgctttggaggcaacttctttcaccatctgtgcacccatgttttcgaacttgtcgtccagctcgatttcacgcgcaacagacacaccatctttagtgataaccggtgcgccgaatgatttgtctaacacaacgttacggcctttcggacctaaagtgacttttactgcgtctgccagaacattgacaccacggagcattttaacacgggcgtcgttaccgaattttacgtctttagctgccattatttctattccttcgaatgcttttatggtttaagaagatctgagtacaaccagtacggtgtaattatgcttcgacaatcgccaggatgtcgctttcagacataatcagcacttcttcattatcaattttttcagcttttacgccgtaaccatcattgaaaatcacgatatcaccgactttaacgtcgagtggtttcatttcgccgttttccaggatgcgaccgttacctactgccagcacttcaccacgggtcgatttacctgccgctgtaccggtcaggacgatcccgcccgctgatttcgcttcaacttctttacgcttaacaataacacggtcgtgcaaaggacgaattttcattgatagatctcctgtaaaaaaatccgtatcaaataacgtggattaaaggttcaggccggatactaataccattgccatgtttgagcagatggggtcagttccggacaagttcaagggggcagagatgaaaaaaatacgaaatttcacggtctctgtccaaactgttcagatatcagggtttatcctgcggattatcatcgttgtgtgacgccggtgactggttgagccgctgagatggagtgtcaccccggcgctcaaattccccttcgtacacattcccccggtttgccgcgttaccggcgaacgggttcgtccgcggctgatacacgcggataaacggcagcacacgggacaccagcagtttctgtaccggcggcagcagcaacagcagccctaagaaatcggtgaaaaagcccggcaggaccagcaggataccggccagcaccagagagacgcttttgatcatctctgccgcagggctctcacccgcctgaattttctgctgaatcagactcagattacgcattccctgattgcgcaccagagatacgccgagacaggatgtcagcaccaccagcaccagtgtcataaacacaccgatggcggatgccacgtgaacaaaaatgaccgcctcaatatagatcagcagacaaatgaggataaggggtaaccaacgcataacgtcttccttatgtggtgcactgtgatgtaaaaaaccgcccctttgtcagcctttgtgaactacttctaagagacgcgctgtaaattcgatttttagtcatggatgttcataatgatggggtcatttcagacgttttcaagcgcggcatgtgccggaatcgcacatgatatttgtgatttatcgcacataagagtgataatagtgcaaacatttcagttaataagtgatctggctaaaaggattcaacgcaaatacagaatatcatcactgagaatgcaataaactaagtgatactctctattaatatcggacaaaataatataattgctgtctttactattaagtaagacaaccattcaatcaaagaaggttctcatgtcaaataattttcgtatcgaagaagacctgctgggtaaacgcgaagtaccggacgatgtgtattatggtgtccatacactgcgggctatcgaaaatttctatatcagcgaccgtacaatcaatgatgtcccggaatttatccgtggcatggtgatggtgaaaaaagccgctgccatggcgaataaagaactgcacactattccgcgtgcgattgcggataccatcatcaaagcctgcgatgaagtcctgatccacggtaaatgtatggatcagttccctgtggatgttttccaggggggtgccggtacttcactgaatatgaacacaaacgaagtactggcaaatatcggcctggaactgatgggccataaaaaaggggaatatgagttcctcaacccgaatgatcacctgaacaaagcccagtccaccaacgatgcttacccgaccggcttccgtatcgccgtctataattcaattacccagctgattaaatccgttgagtatctgaaaggcgtatttgataccaaagcaaatgaattcaaagacatcctaaaaatgggtcgcacccagttacaggatgcggttccgatgacattaggccaggaatttcacgcctttgccatcctgatgaaagaagaagtcaaaaacctgcaccactctgcacaactggtgctggaagtgaacctgggtgccaccgcgattggtaccgggctgaacaccgcaccgggctatcagaaactggcggtggaaaaactggcggaagtgaccggtctgccgtgtgtgccggcagaagatctgatcgaagcaacctctgactgcggtgcttacgtgatgctgcacagtgcgctgaaacgcctggccatgaagctctccaaaatctgtaatgacctgcgtctgctctcctccggtccgcgtgcgggtctcaaagagatcaatctgccggaaatgcaggcgggttcttctatcatgccggcaaaagtgaacccggtgattccggaagtggtaaaccaggcgtgtttcaaagtcatcggtaacgacgtctgcgtcaccatggccgccgaagcgggtcagttacagctgaacgtaatggaaccggctatcggccaggcgatgtttgaatctatttctctgctgagcaacgcctgccgcaacctgggtgagaaatgcgtttccggtattaccgccaacaaagaaatttgtgaagcgtatgtgttcaactctatcggtatcgtgacttacctgaacccgttcatcggtcaccataacggggatatcgtcggtaagatttgtgcggaaaccggcaagagtgtgcgcgaagtggttctggagcgcggtcttctgacagaagctgagctggatgatattttctcaattgagaacttaaagaatccggcctataaagcaaaacgctttgatgactaatataataataagaaatacatagaacacaaaagcacgtcatcgcaaggtaacgtgcttttttattaccctactacaaaaatttaacatttttctacgggattttacaggagcacttatgctagccatcgaatttattatcgtactgctggccatttatctcggggcgcgcctcggagggataggtatcggttttgccggcggactgggggttcttgccctcgccgccatcggcgtgaaaccgggcagcatcccgttcgacgttatctccattataatggctgttatcgctgcaatctctgccatgcaggtcgcgggcgggctggattatctggttcagcagactgaaaaactgctgcgccgcaatccgcgctatatcaccatcctcgccccgatcgtcacctattttctgacactgtttgccggaaccggtaatatttcactggctaccctgccggtgatcaccgaagttgccaaagaacaggggattaaaccttcccgtccgctttccaccgccgttgtggccgcacagatagggatcaccgcatcaccgatttcagcggcggtggtgtatatgtcatcggtcatggagccgatgggcgtcagttacctgcatctgctgatgatcctgctgccatccacctttgtcgcgatcatcctgatgtcctttattgtgtcctggctgtttgatgacaaactcgccaatgacccggtctttaagaaacgtcttgctgaaggcgtggtggaactgaaccgcagtgaaaaagctgccatcaaaccagctgccaaactgtctgttctcctgttcctgctcggtgtcctgtccgttgtggtctttgcggttgtcaacagtaagagtgtcgggctgctgtctgaaccgattatgtccaccaccaacgccattctgattatcatgctcagtgtcgcgacacttattaccctgatatgcaaggtagagacggatatcatcctgaactccagtacctttaaagccgggatgagcgcctgtatctgtatcctgggtgtggcgtggctgggcgataccttcgttcaggcaaatctggagtggatcaaactgactgccggtgatttaatcacgcagcatccgtggctgctggcggttattttcttcttctgttctgccctgctctattcacaggccgccaccgccaaagcgctgatgccgatggcactggcgctgggtgttacaccactgactgccattgcctctttctctgcggtttccggtctgtttatcctgccgacctacccgaccctggtcgcggcggttcagatggatgacaccggtaccacccgtatcggcaaactggtcttcaaccacccgttctttatcccgggcaccattggtgtcgcactgtcggtctgcttcggcttcctgatcggcagtgtcgttctgtaattccctgcactgataaatccgccctccggggcggattttatttacctgcgtctctcgcctttcatcagcactcacgttattctggatcatatgcctttatcagggagaacctgctgtgcaacgtgaagacgtcctcaatcaggcactgagtctgctggaaaaccacggccttctgatgtctgaagccaccctcaacgataacctggacattgatcccgaacgcctgcggattttctggccgacccgtaatgacctgctctacgactgcctgcgttaccacggtaatcagattgatatctggcagcgccgcattctgctggatgagtcgctgtcctgtgaagataaactgcttgcccgttacacggcactggcggaacgtgtccgcgaaaaccgttttccgggatgtctgtttattgcggccagcagcgcctttcctgatgcggatcaccctatccatcagttatcccgccagcagaaacaaagtgcctttgcatttaccacagagctgctcagagagctggatattgatgattgcgatatggtggcccgtcagctggaactgattctggaaggatgcctgagcaaactgctgatatcccgcagtaccgatgatatcgccaccgcccggcggctggcagaagatgtgctgactatcgcccgttgccgtaaaaacggcgcactcagctgatttattcaccacatgcataaattgcgtccgcattctgcataaaaagagcacactcacactttttttatggttttttgacagaaaggcattgacgcaaaccacggaatacggtttaatgcgccccgttgcccggatagctcagtcggtagagcaggggattgaaaatccccgtgtccttggttcgattccgagtccgggcaccactattcaaagaacccgccttatggcgggtttttgcttttcaggcttctgtaaaaacaggtttcctgtccccgccggatacaaccacaatcaactctgtgcccttccggcacaacaggtgatttcatttcgctgctttgccgcataccggtcggttaatacagttacatttgtattagtgatatcatttttaaggcgcgattttccggttttttatctttcctctcatttattccttttttaaatcacaactttcaagaaaagaaacctgagccggtaaatacgtgttggtcgccatccgtttccggaaagatcatattatataacgatggagcgccgggtaaggtgctaaaacgaagccggatcggctacaatggtgtgatacaaaccactggtaccggcatgaaccccggaggaatttatggaaaatatagtaccggataaatactacgatatcgctgatgagtacgcgctggaatcggaagaaccggttgaagagcaggagtatgacggactggcgcactattttcagttactgatcacctgtctgacgaacaatgaagagatcagtgaggaagcccagaaaaagatggcagctgaagccggtattaataaacagcgtatcgatgatatcgctgaatttctgaaccgctggggtaatgattaagtcactatcagcgccggacacaaaaaaaccgggataacagtattcctgttaccccggccggatgttactgacagttaaaagcggtatttcagacctaacataccctgtgtatccgagtaatgatcactgccggcctgctgcgccacgttaaaccagatgtccgcattgcgggtcagttgtccttcaatccccactttaatttcaccgatattgcgggtgccggactgaccaacgtgatcgtcgtccatggacacgccggtcatcttactgttattcagccagttaatttcagcaaacggctggaagtgacgatcattgtctttatcctgcaacgcctgtcccagtccgtacactcttaccccgagacgggtctgaatattcccttcaccggtcgccgatacgcgggtaccgccccgctctgtatgggtatccattttcacacccatataggtcacctgtgctttcggctgaataaaccagcggttggtactgccatcactgccctgtgtttcatttataaggaaactgtatccggcttcggcggaaagcgtgataccgtcagaattatatttttcttccggtaattcgtctccgttaatccggtttttaaaccagttgtactgcacccagctgtcaacatacagaccgcttttatccgcttcattcgcgtagtaagtaccgtagatcccggcactgtaaccatctgcgtcagatttggctctggtctttgtcacatggtttgtggtcttgccgctgatgcggccgtaacccgccattaacccgatatgatagcggttaagatcattatcagaccactgtgcgatatccccgcccagttgtaccacataacggtttgtcccggtttttaactgtccgtcgccgcttttcacggttgaatgtccggccacattccgcagccacagactggtaactttgcgctcaccggtcagtacatcggtatattgggtttcaccgagacgatcatgcagacgcacattaaacaggttatttgccatatacaggttattgatatatcccccggcttccgggcggactaccggttccggttttggctccggttccggctctggttctggttctggttccggtgtcaccgggctgtaatctgatgtcagataccagttattctcattgccgtttttaccgcgtcccagataataatcatacgccccggcaacaatccgcccgttctgagtgaaagtaccgtcagaaataccgtcaaccgtgataacttcaatgccgttgagtatggtcagcccgccctgcccgccgatattcacaaaactgacggtagtggttccggcagaattacctttgatcagcagtttatcagtcggtgaatcatccccgttcagcaccgtattcataatcaggtggccgccgttaccggtgtaatcaccagccacggtcagtgttttcggtacaaaggcgtccggatcgctcagatcatccggagagttataacggagtgtcgcaccggtcagtgtcaggtttgacagcactgaatcagcggtcatattccagatactgttggcaccggcaatatccagattaatggtaccgtttgtggtcgtattcggcgcgcctgccgcattatattccagtgagttggtactgccggagaaccggctgttatccgccatctgcagatcaataatcccttttgtctctgctttcatatcgccgtcaacggtgaatacactgcggatgctgtcaccggacaggcgatcagaagaggatatctgtgaatccgcccctttggcatacagggcaaatttccggccgtcactgaccacattaatggtggtatcaccgccgagatatacctgactgcccgcagtaactgttgcaccaccaacctttttcgatccggcttcggcataaataccgtgtgccgtcgtgccttcggcgcggatattcgttgaacccagttcgataataccgcctttgttggcataaaccgcatgcgcagagccgccgtttgccacaatggtgctgttatcgccgatcaccacacgggcatccccggttgctgcggagttggtattcccggcgtaaaccgcatatccggtgcctaattcgcgtcccagaaattccagattactgccggcttcgtgcgaaataatgactgcatttttcccgagggtaatcaggttctcgttggtgccggtagttgatgagttagcacgcacccccatcccgaatgcatcaatataggcatcgtcacccacggtaatcaccgtgccgttactctctttgccgacgttcagaccatcagcggaagaacctgtggttttaatggttaatttatcaatattgattttactggcaccgttttttgtcacgataccgtcagatttggcgccgctggtctcaatattcagctcattgaaattataggtgctgctgttcccgtaaaccgcccagccctggagtggcgagattgacgcttccggcgtagtattgatagtcacactcgcataatcggataatgccgttccgccgtgctcaccagaattgtaataataaatagtggaggtacaggtcaggtgtttttttccgtcgccgtctgtcaccgatgtacagggatccgctataccgggaagtgaatataatcccgaccccagtataatagataccggcaatgcgaatctttttacagatttatattttttcataagggaaagcctcccggcgcaaaaataaaagcaggatacaaaagttaaaaaacaattaaataaaatccatccggctttattaatatataaagtcagcagataaatattattatcagaaataattcaggttatatttacgttacacattacgtgtgtttatctgttattacaaccacgataatagataagatatttttatgataatgatgttaataaattgttttgattatttttaactgatatttcaatgaattaatatgaaagatgtaagtaaacattacttagtaacaaaatccccggaatgtttattctttatttatctataattggattaacaatagcatgaaatgtcacttaatcgcaatttaaacaaaatttaatgcattgaaatcaaaacaaacagaattttgttacagatgtttgttttcttaacgcgtgaccgcataaaatttaacaattaaataataccgctgccatcacactccctctgtgataaaaacaatacaaataactgtaaaacaagcaataatttaatattgtcacattatactgatggcgaaatatactgaaaaacgcccattattacagacaaaataacgcattttatgctcacgatttgcttaacatgtcttgtcagacaatgacacgaaaagatcgaataaaaaatttcaacaaaaaattcatgtaaaacatgagagattttttatattttgcgctgtgtcaaataaaagtgattaaactacataccaaatatgtaaatttatgaaaataataaaacataccaagattatatttgcatcaaaaaataacatgtgttatttaattttaatcattagatacacaattcatttttttgaaaaaaacaccagacatgttaataagacaagaaaacacaaccggtaattatttaccgggaataacaaccattcctgttatgacagatttaatctacggagataaatggtgcagaaatatcaatgcatagattcagatttactcaataaaaatatcggggaggtgctgtacagatttcgtaagctgaaaaaaataagcggtgagaagttaggctttacacttgaaatcagtcagcaacaggtttcccgctatgagctgggtaaagggaatctgacggtcagcctgctgttccggatactcacagcactggatatctcactgatcgtttttctgaatgaactcagaaaacaatatgattcatcagatactgttcatactttattggacatagataatttattgtttttaaataaaaatattaataaacccgattttttattgtaaaaataaccacaccttctgccccggccatgccactgtcaccggggccatgactccccctcactaaataaactgattctgttattttttagaaaatacatccctgagaaataaaaagatactgcccctctgcgcaacaaattgcacagaaaacacacctgcaataaacacagaggaaaaacaatgaatcaggatctcaacacacaggatctgtctgcaccggcagccggtattgacccggtagtacaggtcatgggcggtaacagtgatatcgcactggatttggtggtaattattgataccagcggctcaatgtcagatgagtccgccgatctgagccgtgaaatagacgcagcgatagagaaagcggcagcccgctgtccgtctcagctgcgggcgactttcctgggcattcagggtacctggaccggcacaaagtttgatcagacagtgagtgattatctgattggcaaaggcgcatccgagggaaacttacaggccagaaaaccatttacagaggctgatggccgtgaccatgccgggaataaggaggatttatgccgcgcggttattgatgccagtaaatattttgactggcgtcccggcgcccggcgcgccatttttgtgctgggtgatgaaggcatggaaggcggcggcggaatactgaccagtgccgctgtcacgaaaaacagtgaggctattggtgtcgcgcagcttcacggcgtcaaagtttacacctatcagggaaccccggatgaccgcccggaaaaccttgatcgcttcccgtcgattgcggaaagagacaaagtgacaaaggagtatcagcggctggcagagcagaccggcgggcgctcttatatctacaccaccggtatcgcgaacttcctgctggtattacaggaaattctctgtgacagcctgacgccgccggtgattccggataacggtcattcacatgcagactgccgcgatgtgtgtgaacagctttcctcaattatttccaccgtcaataagctggcggatattatcaataaagccattgatgcctgttgcggcacagatgttcatcatcacaaagagactgccgccaaatgcagttgctccggtaaagtataaaccgtaaataatgagtaaaagcgccctgttaatatcacggcgctttttttatttttatcagacggataccgtttttcgccggtgggaagacgggaatggcggcaatactgcatttttcagtgccagtgatgccggatggcgcagttgctcaatacacccctgcggcgatgtttctgcaattttgccctcatccataaccaccacgcgtgcggcaaaccggctgaccagccgcagatcatgtgtgacaaacagatacgcaatcccctgcgttttctgtaactgcccgagcagtgtcagcagagatgcctgcagatgaatatccaggtttgataccgcttcatccaggatgatcagacgcggatccggggccagcgcccgtgcaatgcagatgcgctgtaactgtccgccgctgatctgcgacggcagtttgccgagtactgacagcggcagttccaccatatccagcagttccgcagtccgggctttgcgctgtgtttcatccagtgaggtcagcaatttcagtggttcggcaataatctgctccggggtaaaacgtggatcaaccgcccccggcggatcctgaaagaccatctggatctccgaacggaactgccgcagctgttttttatccagtttgcgcaccggcattccgcggtaaaaaacatcccctttttccggatattccagcccgcagatctgacgtgccagcgtgctttttccgcagccgctgcgtccgagcagggcaacggtctccccttcattcagggtcagggaaatgtcatcgagaatacagcgcggctttcccgctcccatcagtgaatggctttggtagcttttgctcaggtgttcaacagagatcaatgtcatgcggaaagctccagatcatacaatgaaagatgtgcagaaataagattgcgggtcaccggtgagcgcggccgggaaaaaatatcctccaccgggccggtttcaataatgttcccgtctgacagcaccgccacctgatcggcaagacgcgccaccacacccatatcatgggtgatcagcaaaagcccggtctgccggtcagatactacgtgatccagcaaatcgagaattttcatctgcaccaccagatccagatcggtagtcggctcatcagcaaacagaaacggcgcgtcgctgaggatcgcaatcgcgatcatcatccgctgtaacatgccaccgctcatctcaaacggatagagcttcaggatatgctcactgtcccccagttccacttccgccagcacatcacggatgcgtttatcaatatcatgcagcggctgccgggtggccttcagtgtttcggtaatatgctgatgcatggtccgcaccgggttaaatgcactgcgcgggttctgcataatcgacgccacttccctgccgcgcagggcctgtccggtgaccggctgtccgtccagcaaaatagtgccctgtgttttctgcacacccggcggcagtacatccagcagcgcagagcaggtcatggatttgccggagccgctcgcgccgaccagcgccagcacttcgccgcgccgcagtgaaaatgacagatcagaaatcaggaaatgggcatgattattatgcagataccccgccgacagatggctgacctccagtacagaatgatttaatgacatgtcccggccctcagtgtcggatccagacgatcacgcagagcatccccgaggatgttaaacgccatcacactgaaaaataaaattaaaccaggccagaaaatcagcatcggtgatgtccggacaaactggcgggcatcactgatcatcacgccccactctgcggtgggagccgccacgcccagcccgaggaatgacagcccggagacatgcagcatcatgtggccgatatccagagtcgccagcacgatcagctgggaaatggtggccggaaacagatgccggagaaagatccgcacattcccggcgccgctcagacgtgcggccagcagaaattcccggtggcgcagcgagaggatgatcccgcggacaatccgcgcataccacgcccagtgtgacaatgcgatcgcgataatcacgtttgtcagcccggtaccgaggataccgattaaaaacagagccagtaccagtgtcgggaatgtcaggaacacatcggtaaaccgcatgatgatttgatccgtccgtccgccggtaaacccggcaatgccgccgatcaccagtccgagcgtcataataatcaccagcgtgatagcgacagtgccgagagaaatccgcgccccggcaatcagacgggaaaaaatatcacgcccgagatggtcagtaccaagccagtactgactatccggttcctgaagccggtttgataactccaccagatccggatcatgcggggagatccacggcccggcaatcatggccagcaccagcagtgccaccacaaacagcgcaaaccacaacaaaagattgcggctcagtgtccgccaggcggaaggggctttcagtatcatatcgctcattcgataccctccgcagagaggcggatgcggggatccgcaatcgcataaataatatccacaaccaggttacagaggacaaaaatcaccaccatcagcagggtaaagcactgaatcaccggataatcccggttcataatggcagagaccgcatagcgccccacacccggccagctgaaaatactctcgataatcagcgcgccgccgagcagttccccgatatgcataccgatagccgtgatcaccggcagccaggcgtttcgcagaatatgtgagcgctccactgtcatttcagataacccgcgcagccgcgcataacggacatggcgctgcccggccacctcaagcatgcttgcccgcagcaaccgggcattaatcgccagtgacatcagcgagatagcaatgaccggcatgatcaggtgttttgcttcccctttacccatcggcggcagccagccgaggtgaatcgaaaagagcaggatcagcaggaaccccagccagaaattcggcatggaaaccccgataaacgcaatcacccgcaccagctgatccggccatttttcgcggtaacgcgccgccagcatccccatcggcacagacagaataatagtcagcgccagtgccagccccgccagttgcagtgtggcgggcaggaaatagagcagatccggcagcaccggtttctgtgtggcataagagataccaaaatccagatgcagcgcgtcagacagccagtgaaaatactgggtcatgatcggcttatcgagaccgagaagctcacgggcgctttccaccgcctgcggggtcggcggaattttggagagccgcagataatccagcgcggggtcagacggccccaggcgcaggatcagaaagataaacagcgaggtgccgagcagcatcggaatcagcagcagcacccgccggaaaataaatcgcatcataatcgcggacctgttacttcgcagccggtgtcagctgatcaaacgggatctcatttgacatcgcgctgaacggtacatcgccgatttccggttttgccaccgcaatggcagtgatgtaggtcagcggcagataaaccgcttcttcatgcagacgggtcaggatatcgtgatacaacgcacgacgctgtttttcatctgtggtggtcagcacctgtgtgattttggcatcgatttccgctttatccgccagcccttgttgtgcctgataatcggcatgggacggaatacgcatggaactgacaaacgcgtgcgggtcaaacggcgcaccccaggtgccgttgaaaatcatcccgaagcggccgtctttctgacgtgagtagatactgctttcctcctctccgaccagcttcacatcaatcccggcgcggcgcagatcggcctgaaccacttcagaaatcgacttcgccaccgcatcggtaccgacaaaattcagctccaccaccagcggctcgccatctttctcacggataccgttttcggttttcgctttccagccggcgttttccagcagcgatttcgcttcctcaacgttataggcatacggtgttaagccggcgtctgcatacggcacattttctgagaaaagggtgtcagcttttaattgtgtgccatacagcaccttttcaatcattttatctttatcaaccgcgtgattaatggctctacgcacagctaaatcacgggtcggcccggttttggtattgatagccagcaccagtgattccagaggtgcagagagtttggtggtatagcccggcatatttttaaagcgctgataggtgtccggataaataataccgtccgtgccatataataaatccacctcaccggcttcaaatgccacggcgcgggtattcgggtcaggaattactttaaacgtaacggattcataaaccggttttttaccccagtacgattcgttgcggacaaattcatctttctcactcagacgggattccgttaatatccacggaccggtgccgatcggtttaataataccgtctttggtgccgccgtctttaaactgtgacggtgcaataaagcggaacggacgcggcagcgccagctcctgcagaataggataataagcatctttcagggtgatttttaactgattcggcgcgatatcctcaaccgccgtaatctgattagccagttcaagccaggcgtgacgctcgcggtttgccagaatggcatcaaagtttgctttggccgcagcggcatcaaatttttcgccgttggagaacttcacatcttcacgtaatgtgaaaatataggttttaccgtcatccgaaactgtccatgattccgccagccagggctttacggttccgtcattcatataacggaccagcggctcatacaccatggtttgtccggccatctgattcggcgcgtactgatgcggattcagcggccccacattcaccggccaggcaaaatttaaatgcggatcggcaaaggcggtatttaacgacccggccacgagcgccgcagacaataataaagaacggacaacgttacgcatatttcactcctgatgtgccacagacaaataaataaagaagtcagaaaccggttattaaaataatgcagtttcaatatataagagtccgctgcgtaattatgtactccccctgagtacttattccgaaaaaaagataaactccggtgattatcagcactggcggatttttcaggaaaccggaggctgttattgcgttatttacctgtttattgtccgggagccggaaaaggcgataaccacactctttatccggtaaaagctgcaaaaaggtgccgatcccgctatactggcggccgcactgaagacagtgcacataaccacgggcaaatatcaccccatcgtgtgacaatttgctgctccccattgtgaaaatctgagagtctcattatgtcattaccttcatgtccgaaatgtaattctgaatacacctatgaagacggtgcaatgtatgtgtgccctgaatgtgcccacgaatggaatgatgccgaaccggcagcggaaagcgacgaactgatcgtcaaagatgccaacggcaatttactggcggacggcgatgccgtgacagtcatcaaagacctgaaagtcaaaggcagctcatccatgctgaaaatcggcacaaaagtcaaagggatccgtttagtggaaggtgaccacaatattgattgtaaaatcgatggctttggtcagatgaaactgaaatctgagtttgtgaaaaagagctgatgttctgatataagattgctgacaaaatcccggcctgttttttcccggactttgccaacaatctgaggctccgcaataccggcggagccgctttctctcagttgagatattctgattttgatgtcactgatgccgctgtataaatatcagactgaacactgagactttcttcatataaagcgttgtcctgacacccggcaaaaaaccagccgaccggtgtctttaaaatatctgctgccctgaccagcaggccgacattaatccggctttgcccccgttcataacgggataattgctgctgactgatccccagacaggcagcaatctgctgtcctgaataacccagcgcttttcgtctgcaaaaaagccggccaccgacagctcggtttaccgatgccatatcggaatcatatagaatatctgtcatatttattaccttcagaaataacatcccccggaaatacattcgggaagaaaataaaaataaatttaaatttaccacctgaataaatttaaatttatctcaccagtaaaaattaaaagaaacacctgtcaatagccaaataattccggttaaaataaataaaaaaagcaataaaaaacacaatacacaacaataaaatgaaagtcagataacaaaaaatgttattaacgtcagataaatcagcaataatttatcaattccattcattaacaacatcaattcaataacaatacaaaataggacatctgtttattttgtgataacgtcagataaataataaaacctgaccttaataactataccgaatatttccatgaaagaacgaaaacacctgagtgaacaggaggttcattccttaatatcatcattacctgactcaattaaccatattcgtaatcaatgtctgattgccgtttgtttcagtcacggattacgggccagtgaactgaccggattaatgctcagtgatgttaatatggatgaaaaaaccattcatattacccggctgaaaaacggattaagcaccaatcagcccttacagtcccttgaatatcaattactgatacagtggctggaacaacggaatacatctgtacattatgccgaaccctggctttttctttcccgtaaaggcgggcggttatcccgccagcagatattcaggattatccgcgacagcggattgtccgccgatctgaatattgcggcacatcctcatatgctgcgccatgcctgcggttatgcattagcggacagaggaacagacacccggttaattcaggattatctcggtcaccgtaatattcagcacaccgtgttatataccgccagtaatgtggcccggttccgcagtattaaattgtgattactgctccgtgaaaaccaaaacagcattcgccgtaaaatccccggttttcaggtctgtcgccgcaacagccgggtcacgcactgcttcaaaacccagcttcagggtatgaatacccggctgataactcagcggatagcttttccccggcctgacaacattaccgctatagataacagctattcccagccccttcgttgtcgtgctgatgatttcctcaccaccgacgatgagcggggtatacttcaattccatattggcgttgtaagccatacttccgctgcagtttattgaaatatctttggaaacagactgaacagatgaaccggcttttaccgcaatattattccgttccagtttacccagcaggacatccagatcagcgccattattcaggaggcatttcgggggttccataggtaatttatacacatccccgcaaaatataccccggccgtcaggcccgtaacccagattacctctgtattcataaccggtattaacgtcactgagtgtaatacaatacccgcctgctgatggcgatctgttaccggcaaaccgcttaacaatatcctgttttttcaatgggatagaagagttcagcttaaccacaccacccgataacaataatgtcccgtttgctctgctgcaggtatccatattctccggtaagggacaccagtacatttttaattcaaacaggccggaaagcggcacataagcctgatcatcaccctcggtaaacatattcggtcttatctcaacacgctggttaacaccataataagcaccggcagagtgtctccattcacaatccatccccatccccgaccccggactgacctcgtgacctccttttgcacaaggtgatcttgcacccacccagcctcttgcatatacagattgagacaccatcagcagaaaaaacagcgccgccacacgtatcattaatttattcatcatttactcctacaaatattccgccaccagcgtgccggtggcccggaacggagactgtgttaagtccatgcccggcacttttaccagcagtgcttccagctttggccgctgcgtaacatcatcgattttgaaaaatttatttaactcaagcggctgtccgtccttcagaatccgtaccagcaaaccgctgacatcactttcaatcgctgacggatcagataccgacgggcgggatgtcataaagatcatccgcagcgtatttgccggattaactccgggacaatccagtgtgtaattaagcggcaggctgtagactttcgtgtccagcttattaataccgacatttttaaaatctgctgtaatcgtctgattattatttaccgtacagacagacagcgctctcagtgtaccggtaaaattaaaggttttattatcaccggtctgttcctgcccggcctgcactgaccatgctgccagtaagaaaaaaccggataacataactattattatttttttcattttcattatttcccggttaatcaaaagtcatggttaaaatagcttgtgatgtaatggattgtccgtttatccatgtattatcatcaggatgtacctgcactaattcggcctgcagcttcggcagattcagaatatccacgttaaaatcagtattaatatcctgctgttttccgttaaccagcagacgaatccccagatttgcatttattaccggtgtgctgccgacactgacaggcagcaatttatgaccggcatcatcaacggtatcaccccgcgcagagtccaggcgaaagcgggtctttcctgctgtatcaccggtacaggtcattccgctgtccagcggtctgatataactaccggtaatattatttacaccggatacggaggaaaaacgaatatccccgaaattaatatccggtgatgattgattgctgaatgtgcagcgcccggtggcaatcaccgtaccggatatatttattttcagccggttttcatcaccggttttaccctgcgcgggaaataccgtcaggctcactaccgctaataacatccagcccggtagtagggtatgcgcagcctgccggttaaaccgttttatgaatgtcataatactgtcctgtctgtgttgtgccctgcgggctacggatatgagatttcaaacgtggctgtcgctgacagcacacctgtcgtcagggttttatccttaacagcatccggctctgcctgcacatacccctgaaaattcagtgtggttgtgccgtcactcagggcatatgccgggctggttttattcagcggcagcggccctgccggggtttcgattccgatcgccaatcccggtaatgtgccgttatccggcaccagcaatcccggcagcgcgctgctttcagccccgcgaaacgtgataaaggcttctttaccgatagtggtatcacatccttccagctcaatactgaacggctccggcggtgtccggtctgcggtataaaaatagtttttgactatcgtaccgaacgacagcgtgatattttcactcgcctgcgataaggtgcatggttcaaacaccaactgcccttttacttcaacatccgcgccgtgtaccgctgaacacatcagcagaccggaacacagcacagccatacacggaatgaatctcttcactttctctgctcctggtctgtggtttcgcatcagcccggtttcacttcgcccacccggcaggtattaccctgacaggtaaaaatcattttcgggcggccgccgtaatcattgatgtaacccagtaccggcgcattccccagtgacacggcactgccgccgagaacttcactgctgtttggcgcaatcataaatgcctcaaacccgctgatatcctttcctttatatgcggcagatgcggatgaaatcgtcacgtaatacggagtcggattattcaccgtgtatgtatttccctgccgggtcagggtaatactctcctgccatggttttgcattctgcgtcaccactaagcccgccggacggtaaaacagtttgatgcgggtctgtaaggcaatctgcaatgtgttggctttgtccgttttcggcgggatctcccgcagattaaagtaataaagactctctttatcctgcgccagcatcttcattccggctgtcggctgaatttttacctgacttttttcaccggcttccacccgctgaatgggggggagtgccaccagcggatctttgattttgttaccctgcgcatcttcaatccatgcctgagccagatacggtaactctttattttgattagaaatttcaacactttccgcccgttcgctgccgtttaaaatgacacgggttctgtccagtgcaatcgccgcctgtcctgccggcgcagccaggataccggccagtatcagtaccggaaggcttcgtgaagtaaaacggttgtattgattcttcattgcttactctctctggtgttctccgcgtcagcatctgtcagccaacgggatattttttctgtttttactgacttttctgacttttctgacttttctgacttttctgacttttctgacttttctgacttttcatgtaccggattcgccacagagacacacggcaacagcagatttccgtccgggatcgtcgccgggaaacggatttcacactgaacatccccgccccatgacacctgcattgtctcttccggattgataccggagagccagaccatgccatcttcactgaccatcccggtctgtatatgatcgtggttctgaaccacggccccgaacggcggaacatctccgtcagccaggctgagtaccgccatcgctttctgtcctgagacaataccgaagcggcggaaaccgacagcaccttccgtcagcgtgccctgtactacagagcgggtggcttcggcgttttcccccagccggttcagatccacattaacgctgctgcggtaatagttactgacgtcactgacgaccgctttaccaaagtagttggttgtggtttcagcacctccgccccggacaggaacatcagctactccgccggtatccaccagcatccgtgttccgcccatcacaccactgcggtgcagtgccgcaccttctgcggtggcggtaaacccgccgcgtacagacagcccggccgcactgtagcgttcaccggaaaatccggcaattgcggttacttccgctttatcgccgcgataattcatataaccgttaccggtgacccggtgatcgccggtcactcctgtgctgagacggtaatttgtccgctcattaatccggtcactataatccgccgagtgactgttctgccctttactgaattgtccgctgtaaccaaaactaccactctccctccacggcacagacagcccggcatacatcccgtcatcgcgtccgttttcgtggcggttgcggtaagccgataaattcagactgatatttttcacctgcccgatatcaaaataatgagaggtggaaatattccagttatcacttgccgggcgatcccagtaggtctggtggttaaaattcaggtacacattggtattcagcgaactgaacgattgactgaatgtcatggtgtacatctctttgccgttacccgttacccgttaccgctgaattgtgataacgggctttcagatattgcgacatggtcataaaatcccgctctgaaaaccggtatccggcaaaggtgacccggctgttggtggcatcgaaccgtttggaataactcagccggtaagagccgccttttttggtttcaccgtccggcagtgacgcgcgggattgggtgatatcggcggataatgcccccagcatcagcaggtcacggccgatacccgccgagacagcattatatttaccggcaaataacccgccgccgtaaacagaccagccgttactgataccccatgaaaactcactgctgataaactccggtcctttgacacggtggtcatattccgagggtttaccgagcgccactttgtaacgcaccagtcccggacgggtcagatacggtacacttgccgcatccacctgaaaggtctgtactgaaccatcctgctccgccacttccacatccagtttgccggacagcgcattgcttaaatccctgatctgaaacggtccggcggcaaccgtggtttcataaatcacccgtccctgctgtttcacggtgaccctggcgttggttttcgccactccggacacttccggggcatagccgcgcagattcggcggcagcatcatgtcatccgtatccagtgccacaccggtatagcgaaagctgtcgaacatgccggaggtgagataattttcccccagtgttaattttgcccgcagcggtgcaatcgcgcggtaagcataaaaccggttccagtcccagcgttggtccgattcatgattagtacgcgaatagcgcccctgccagtccgcacgcagacgccaggcaccggcattcagcccggtggtgccgttaccgctgatgtcctgccggtcactgtgtccggcctcgcgctgttttgtcagttgtgtattgaggttgtaatcaaggataaaaccggcaattccctcatcccagcgtgacggcggatcccagttatctgtggtatattccagataggcctgcggcagactgacatgcagtgccccggcagcaaaatctgcccgcagagtcatccccggcagtgatgccggatccgcgcactctccgttatgccaccaggtcaaatccccttttgcagatgaggtcagtcccagctcttcgctcatatcaggcgtaatacaggccatgctgccctgcgggtcattatccggggccagaaaacggatttgccgctctgccagcatgctgttattgaccttaagtgccagggaatagattccgggcatcacataaccagcctgagaaaattgtgataaatcaatctgtccacgctcattcagatccaatacctcagtattgaattctgtaatcttctccgcctgtgccgctgcagaaaacagagagagcaggatcataaatgtcagcggttttaaccgcaccgccgggcacagtgttctgcggcctgacggaagtgcattggctttcatcacaaataatccaggttgaaattaacagtcgaccggtatgcccctgttttcagtgagttgcgatcagcaatcagccgtaaccggtagttcagtgtgatattttttgtctgtggtatatccgggagtgccactgcttttcccggtatgatcaccgaaccctcttcccggctgagctgaatcccgacaccttctgcctccccgctgactgcaaacaatccgttgctgtccgaaggtccggtaaaggttatccgcagatttttgtcatccgctgacaacagacagttttccagccggacagcaaaggcaaaggccggactgtatccgcgctgatataatgcggtggcggcaacctgcggtatttcaatccgttgatatttatcctgcatattgatagtgcaggaggagtccagaacaaatccctgtaaccagacctgcccggtctgccgttcaccctctgccgcataagcagtcaggcagactgccagcagtccggtactgagtatgtttaacttcacgcttgctctccgccggatccccgtaccggatatccggtacgggtaaagtacactgaccccgattactgatagtccatcaggaagtcggctgttgcagtgaaagcacccggcgcaacggtgacagccgttgtggcaccctgcatatacgctttaaatttcagcgtgttatcaccttcgtttaaggtaaatgcggatgatgctgcccccggggcgatcacattaccgcccgcatccgtcacgaccacacccattgcaccggtcgccgggccgctgaccccaaaggctttatccagaccgtctgccgcagcgccgcctgcaacacctttaaaggtgactgtcgtggtggttttgccggtgatatcgcagttatgcaactgaatagtgaaatcaacaggtgttgatttaccacctttcgctaactgaacttttgccacgctgcccagctcaacagtctgtttcaggctgtttgcatcgatagagcatgccgcatcaatcacttcgccgttgaagttgattttgccgccgccctgatttgctgcctgtgcagtcattgccattgcggaagaaactgccagtgcgagaaccacttttttcatactcatatcaaaattcctgatctgctcgtttttagataaaaatgccgacataaggcatacataagcaatgttttgcttttgtgcgtttttgatgcagttccggaactgcctgtaccgtttcaccgtcagcggatttatgatccggccggttatccggtttatttcgtcatcagcgcccgttccggacggctacttttcatccccgtgacgcaacgaaataaaccaaaatgttgcgttttacgtatcacgctgaaatgtataaatttaccggatggcaaaaattgatttggcagagaccaaaaagaaaggaaggtgaaacgagccggaaaaaagacgggatattgcgattttatatcagaaccggccagcacgaatcgttaagaaaattccgcacaggataaaaaacgggcattttttacttaaaaaacaaactatttttgattaaaaaacagactggcagtggttttgacggaactatgaacttattttgatgtattttaaatttaaatattgcccattaaacagacaacaaataatatagcgacgctttggtttattatgttacattattctagtcccatagcccgcgaaagcgccccgaatttgctgcggtgtacagcacagtatgctgaatgttgcggtgtccgagataatcctgaatcagcctggtgtctgcccctttatctgccagtgcataaccgcaggcatgacgcagcatatgcggatgaaccgccaccggcagcccggccatttcccccagctcttttaatatccggtaaatacgggagcgggaaagatgtccgcctttatgagataaaaacaaccagtgattttcagcagcgcggggataacgggtgcggcagttaagccagcgggtgagtaaggctttttctgtgccgctcagagggtgggtggtggaaaggccgtttttcagccgctttatataaaggttatcggcagcaacatccatgtccgataagctcagttgtcccagttcactgacgcggaagccgtggataaaacacatccacagcaggcaggtattccgctccggatcacggccgttttccgccgctgtcatcattttttccacctcagactgcatcaggtgtttacgtctgttttccttcatccggtttccttttgtaccgggagggtgcggataatccatactccggaacagattccgccgtataaatatccgcttttccccggaagcactcccggtatgaacgcgcttccggacagtcagcgaaaaaccagctgaccggtgtctgtaacacttctgccgccctgaccagcaggctgacattaatctgactgcatccgcgctcatagcgcgagaactgctgctggctgatcccgagatgatcggccaggcggctgccggaccagcccagctctttccgcttgcggaagatccggtagccgacagatttattaacggttaaatcagtatcttctgtaatcatatttcagtctcactccgggctcacagtgctgcaggtttccgcagcactgtgagagaaaataagaaattacggcataacaagaatgatggagccggaaccttcgaaagcgcccggcgcaacccgcccgttcactttcagcaccgatttcacatccacctgagtcgcaccaccggccgggacatgaatgggtgccccctgctctcccggattgccgttgagataaagatccgcgtacaggctgttatccggccgcagcgggacacggccgctgtctgagcctgaggcgatcacaaggatattcatatccagattacaggtgacagtgatgcttttattacgcgccgcatccggcagactgacttcatcaatatccccgtaatccaggatcacagagccgctggtgacctcacaggcgcccaccggcggcggggcgataccacagagtgaaccgggcagcagacgtccgtttttcgaccagccgcctgattcagattcataaaacagccccacacattcctgattggaattcagcgccgggccgacatgcttcgctgtgccgttatacggcagcgagatattgttcagaaccgcatcccgcacttccgccagtgttctcagcttttccacacggacaatcgatttggtggaagagcccggtgagccgtcaacatcgtgtttgtggttgatattgatccagcagacagaccagccgtagcagggattgggagccgaagggtcttccggatcccagcgctcgataatataggtgtaaatggcattcgatggtgtccccgaggattcggtgatataagagaaaatcgatgcccccgccgaagcggaccagagcagcgcgagcgccgcaattattttcataaatctgttcatagcgagcctcagttacccgtcagtcataattgagatgaaatgtcgcaatggcactgaacggcccgcgtttaatggttttatttgccagcgcatccggctctccctgcacataggcgcggaagttcagcagcgtcagtccgtcattcagcgtgatctgcggtgacacctcattgaccgccagcgccgtgccgtccgcattttccagcccgactgcaatgccttccgcctgactgcccggacttatcgccagcgcaccgctgataaacggattctcatccccggcaaacatcactgtcacccgcctgccgatagaggtgtcacactccgagagccggatccggaaatcctttgagggtgtccgctgataggcgtacaggtttttatcaggaatattgccgaacggcagttccacggtttcatcccccggatgtatcgtgcagggttcatccaccagcgtgccgtgaaaatacaggttgtcaggaaccgccccggcatccgcccccggcagtgataacagaaatacaccgcaggtactgataaaaaagcgccttattgtttcattcattgcattgctcctactgatattccgccagcagtgtagcggtcacatcaaatgcaccttccggcagtgtgctgcccggccgttttaccggcaccgcctgaatcaccggcgggttatccggtgataccgcaatgcgtttgttgagcgtgaagggctttccgttttgtgtcaggtgaatcgccaggtcgggaatattggtctgtaaggccgcatcatcaaacccgctgaccggaccggtaaccgacaatcccagatcccagcctttaatattgtcctcacacaccagggtgtaattgaccgcccgggtgtaattgacgccatccactttatgcacgccgacgttgtcaccgaaaaacacatcgatcacgccgttatcactgattgtgcaggcaggcggcaccagcagcgtgccaaacagcttcatgttcggggcggctgcgctgcccgctgcggcacacagcagcagcatcagtaaccgccggtaatgtattgccatggtctggctccttactgataatccagttccagtgttgccaccgccgagaaatccccgccggtcagcaccgccgtcatatcgcggacaggcaccgcttccagcgccgggaagaccggataagtaaatttcactttttcaccgggattgagttgccgtccctgataaagcatgcgcacccccagcccggcaatttcagtctgtaataacccggcatcaaacccggcggtattgccggtgatagccagcgtcatggcattggtcggcatctttgtgcactccgccgtgtaattaaccggctgtttgtagcgctggccgtcaatgcgggtgctcatcacctccccgaaatccaccagaatggtattgccgttgttgatgacacacggcggcggcgcaatcacattgccgcggatagtgacataggtgatcccgggcacgccccggataccggccacccgctccggcagtgccgcagcacttcccgctgagatacagagcacaaccgccagtatccgccggaggaaacgctgttttctgatccgctcatccatggtttatcccctgtctgttcagttaccggcagccgtttttgtcacacggcactctgcgccgctgcaactgaactgcaactgcggccggccgccgtagtcgttgatataactcagcaccggcgcactgccgagagcggctgcactcaggccgagtgtgccctgacttttcggtgccaccatcagcggggagaacccgttcaggcttttgccgcccagcccgctgagcgcatccacaatcgtcacgtaatacgcagtcgggttatggacttcatagtgatcaccacggcgcgtcagggtgattttttcctgccacggattagtcagatccgtttgtgaggcatagatagcttccgggcggtaaaacagtttgatgcgggtctgcagggcgatttgcaggacattctgccggttgctgcgcggcggaatttcccgcagattgaaatagaagacactttccctgtcctgcggcagtgcggcgatcgccggtaatgcctgaatttttacctgacttttatcacccggttcaatacgctgcaccggcggcagaaccaccagcggtgacgaaattttttctccgttctgatcctcaatccatccctgcgccaggtacggcagctctttattcagattgctgacattcaggctgacagatttctctgccccgttgaaaatgacacgggttctgtccagcgcgatagccgcgtgcgactgtgctgaggccagcaatacagcggcaacggccagaacagagagacgggtttgtttaactgacatcataatgaatcactcatttcgttacgtgtggaaggtgccgggtctgcccggcctgtgatattcagccatttcccctgctgcgggcggtcagccggcggcggggaagacggcagcgcaaccggctgcggtttttccggaacggattgcggctctgcgccgcaggtcagcaacagggtgtacagcgcgtgtcccggcgcaagctccggcaccgtcatccggcacgcagcctcactgccgcgccgcagcgtcagaatatccccgctgttaatgccactgagatacacctgcccgccgtcattgacgatccccagttcgcggttatccgccgaagtcaccaccgcgccgaacggcggctcgctgccatctgccaaacggatagcggccatggctttttgtcctgacagcacatcaaactgacggtagccgatggcgccttctgtcagcgtcagttgctgaacagaacgacgtgcttccgcattttccggcagtttgttgatatcgatggcggcactgttgcggaagtaattattcatatccggcagaacggctttcccgaagcggttggtatagctgagtgccccggtacttctgaccggcacatccgccacaccgccggtatccaccagcagacgggcgctgcccggcatattgatgcggtggaatgccccgccctgcggtgtcattgtcaccccgccctgaagcgagagcgatgcggaggtatattccccgtcaatatgtccggcactggcggtgaccagcgcgctgtcagcatagtgcatgtaatagccgtcaacggaggctttgccgttgctgctcagaccagtaccgaggcggtaactgttgttatcatccggacggtcgtaataactgacgttatgagaattaccatgacggttgatcatgctgttgtagctgaccgtggcgcgatcccccagcggcatgctgatattgagatataccccgtcatcattcttatcctgatatttattgcggtaagcggataagctgatattgatgttcttataactgccgatatccatatacttcgccagcgacaggttatagttgtcgttatccggccggttccagtaagtctggtggctgtagttcagataggtgctcagcccgatatccgggaactgcttgctgaacatgatggtgtacagctctttattgttatccgcgcggttatcgctgtagcggcgatccagatactgattcatgctcataaagtcgcgctcggagaaacggtatccggcgaacgtgacctggctgtccagctcctcaaaccgtttggaataactcaggcggtatgagccgccgcgatactgtttgtcttcctgcggcagacgggcaaaagactgggtggcatcaaaagagatggccccaaaggccatcaaatcacgaccaacaccaagagaaacggcgttatagtccccggcaacgagggagccgccgtataatgaccagccgttactgatcccccatgagaattcccccataccaaagacagggcctttcccgtgacggccgatttcggacggctgcccggcggcgagtttgtactgcacccggcccggacgggtcaggtaaggaatgctggcggtatccatctgaaatgactgtacagagccatcctgctcctccacccggacatccagtttgccgctgaccgcatcattaatatcctgaatacggaacggccccggcgcgaccagagtttcataaatcacccgcccctgctggctgacggtaattttggcattggttttcgccacgccggtcacttccggtgcatagccgcgcagattcggcggcagcatattgtcatcagtggccagattgaccccgatatagcggaagttgtcgaaaatatccgagcgcgagaaggtttcccccatcgtcagttttgcctgtaatgaggcaatcgcccggtagagataggtctggctccatgtccagttatgttcggagcgatccccggaaccggtggtatggcggagattcgcctgccagtcggcacggacacgccagaccccgaggtttgccccggcggtcccgttcccggtgacctgctgtgtctgtttgccgtgtgccgggtcattaataccggcattcacgttgtaatcaaacagcacgccggaaattccctcatcccagcgggaaggcggatcccagttagcggcggtgtattccagataagcctgcggcagtgtcaggataagctcgctgtccgccagtttcggtgacaccgacatacccggcagtgacgccgtatccagacatttgccgttattccaccagcgcaggcgctctgcccattccggtttcagtccggcctgcgctatcagctccggagataaacaggcggcactgcctttcggatcatccggcggcacaatataagagaccggataactgtcaggtaactcactgttatttacccggataaaaaagtcgtaggtgccgggcatgatatagccggcacgggaaaaatcggacagatcaatattctgtttatcgtttacatcaagaatatcagtattaaattcaacatcctgattatccggataagctgcctgcgggataccggtcagaattaatgaaatcagcactgtcagtctccggcgggagacggtactcagcggaattaccataatggatccagtcagctcggtttaataatattccagcttgaaacccactgttgcccggtaataaccggactgaagttcatcactgtttttcacgagacgcgcctgatatcgcagcgccatattattgagatcaatatctgcgggcggtaagggtttgccgggaaccgcctcattcccgttgcggtctgaaatcgataaggaagcccctttgccggagccggtcagctgaaaacgtccgtcctgttcagccccctcaaacgtgacccggaaacggagattatccgccgcaccgcctttcaccggctgcacggtgcattccgccagcctgatccagaagtagtctgcgggtccctgcccttcatcacgcaactgcggaacagaaacatcggtcagcgccacggcctgctcacggctggcggtggaaatagtgcagaccggctcgaggatcgtgccctgcatctgtaccgcaccgaaacgcagactggtttttgcatcctgtttcgtttcacctgccgctgtataagaggaaaaacacactattgttatcagcactccctgagggatgattctgctcaccatttcctgcctccgctgaacgcacgcaactgaaaagcggcacggttcatccctgagccgtaccggcattaattactgataagtcagtgcgaatgttgcgatagcggtgaagtcacccggaacagcggcctcagcagcagaaccctgtaaatacgctgcgaagttcaggtcgttattaccgtcacgcagagcctgcgccgcgcttggtgtgcctaatttgatctgtttgccgcccgcatcagtaataacaaccgccgcgtttttggcaatcccctcaatacccagggaaccggccagaatatcagccgcctcagaaccggtgaaagtggtctgtaccgttttgtaggtttctgtggtgcaattctctaatgcgattttaaaatcacgggaattactgcggccgccgtctttcagtgcggcagtggagatctggcctaacggaacagtctggttttcggtatcaggcgtaatagagcaaggcgcgtcaataattgaaccggtgaatttaacagtaccgtgtccctgatcagcagcagatgccgcacctgcaaccacagacataccaaagcccagcactaatgctaatttattcaaagtcatgttatttcctatattacgttctgcttttttgatattaaaaataacgcggtcacacgcggaaatatgaaaccgcgcggcgttatcgttatttgatgaatatgtctgttccgttatccggatatatgaaaaaacgggacaaaatacatcaaaatgtcccgttaagaatgaatggctgttatcgaataaaaattaagaaagctgttcttttttatcacgcaaaacaggttaatatcgcgtttctacccctctctgtttttaagcactgtcaaaaataatgacagcggtgaagcaggcagcctctgcccggcagaagaaaatattaaccttttaaaaattaatgagttatgtgttgctaatttggctgacacatcaatatttgactaagggaaaacctttagtgataattacaaacaatttgatgtattttgtcttttttaaaattaagaatatttacctctgtacaatggccttaaattgatctgtctcagattaaaaaaagccaattgctgattggtttttatgaatatattgtcaatacgtaaacactttgtagtactttctttcctgtccgttgtctttattcatttttattacttgctatagtgatatctctggtttttatgaacttatcggacaataaacaggaataaatcatggacaaacgtaagtttctgacccgttatgaagttgacgccatcctgaaagaagcccggaaaagccggtatgccgaacggaattactgcatgattttaatgtgctatctgcacggtttccgcgtcagtgaattatgtcatctgtcactttctgatattgatctggacagccgccttatttatgtccggcgtctgaaaggcgggctttccaccacacaaccgcttattgatattgaatataatgcgctggtgtcgtggctgaatataagaaatacctggcgtaaccgggatttggaatgggtatttttatcgcagaaaagcggggctatttcccgtcagcaggttcataccttattaaaacagtacggcagggctgccaatatatccgtggcaccacatccgcatatgctgcgccatgcctgcggctattcccttgcggatctcggccgtgatacccgtctgattcaggattatctgggacaccggaatatttcccacaccgttatttataccgccagtaattccaaacgttttcagcaaatctgggatcctctccgcggataatccggccacctgtctctgaactttctctgttcccgtaaacaggcattattctccgccgttattgtgttattcctgtgattacccgggcaccgctcagattttcgggcggcttattatttttccgggcgcagagtatgtaacatagcggtgaatgtaaacggacagataaagaggaatatgtgaagaaaaaaatcattcttgactgcgatcccggccatgatgatgccatcgcactattacttgcttacggtaatccgcagattgatctgctggcggtcaccacagtggtcggtaaccagacactggagaaagtgacacgcaatgcgctggcggttgcccgtattgccggtattaccggtattccttttgcggcgggctgcccgcgcccgctgatccgcgagattgaaaccgcgccggatattcacggcgattccggcctcgacggaccggtattgccggagccggtgctgacattagattcgcgccatgcagtgcagctgatcattgataccatcatggcacatccgccgaaaaccattaccctggtaccgacagccggactgaccaatatcgcgctggccgcccggctggagccgcgtattattgaccgggtcaaagaggtggtgctgatgggcggcggctatcacaccggcaactggagtgcggttgcggaattcaatatcaaaattgatcccgaagcggcacatattgtgtttaatgcgggctggccgctcaccatggtggggctggatctgacacaccaggcgctggcaaccccggaggttgtcagcaaaattgcggcagtcggcacagcaccggcacagtttgtgctcgaactgctggaatttttcggcaccatgtacaaaagcgcccagggatttgattacccgccggtacatgacccctgcgcggtcgcgtatgtgatcgatccgtccgtgatgaccacccgcaaagtaccgctggacgtggagctgaccggcacactgactctcggtatgaccgttgcggatttccgttcgccggctccggcggattgtccgacacaggtggcggtaaaactggatcactcccgcttctgggatctggtcacggatgccctgcgccggatcggggatgtccgggttgcataacccttctgatgtgccggttcaccggcacaatacataaagtaatctgatcggtaaccagcctgacattacagagcaaatcatcaaaaatattattcatatttacttacattatgtatcaattaatcataagcaaaaaattaataaatgaaaccctaaaatcacatcaatagttaaatgttttattctgaaatgaactattattacaacgttcgaacaaattcttattggtgatttgtctgtgtcgattcaaattacaagcaataagccaaaaaaggaggcaaccgcctccttttttactgcctgaaaaaaagtggaataataactcacacgattaaaaagttttcaaaagtgattatttcactgattttcagatataaaaaaaggaggctttcgcctcctttttcattatacgttctctgaattaaatcagaactggtaaactaaacctaagcccagtacgttgtcggtattgataccggaaccacgggtgaagtcgttttcgtctaacaggttaattttgtagtcgatcagagcagacatgtttttgttgaagtagtagtacgcacctaaatcaacatatttaaccaggtcctggtcgtcgccgtaaccgccgctcaggctcttacctttagactgcaggtaagcgatggacggacgcagaccgaaatcgaactgatactgagccactaactcgatgttctgagttttgttagcagttaagccacggttgtcgtcgttagtaccgtagtgagtcatgttacgggtttcgccgtaaactgctgccaggtacaggttgttagcgtcgtatttagcaccgaagttccatgcttctgcacggtcacccagagcgccgcttgccaggttttctttctgaccctgcggacgtgcggagcttgaatatgcaccaccaacactcacaccccagccgatgtcatacgcggtggagaaaccgaaaccgtcaccgttagcggtgttgtcatagctgtaggtatcgttgattgtgttgtgagtaccacggttagcgatagagttatcgtcgttcgcgccctgatactgtaatgcgaagctcaggccgtcaacgtaaccgaagaaatcagagttacggtaagtcagcaggtttgcagcacgaccggtcatgtagacgtcggtctgagtcatggtgtcgttaccgaagattggcagcacatcggtccatgcgttggtgtcatagataacaccgtagttacggccgtagtccagtgaaccgaactcagcaaatttcagaccagcgtaggctaaacgaactttgtttttgttgtcgccttcagtaccgttggttttgatttcgttttcgaaacgaccaaagccggttaattgatcagtgatctgggtttcacctttgataccgatacggaaacgggagtcatcaccgttctggctgtcaccatagtggtcattgtcgctgaataaatgacgaacatcgactttaccgtacagatccagtttattaccgtctttgttataaatctctgccgcgtttgcagcgccgcttaatgcaacgagcgggactaatacagctaataatgtctttttcattttatattcctattatattaaccactactctctgaccctatttacacagagccttgtagattattcaccctgaaagttcatattacaacacgatctcagccccgattgacgctaaatagcaagatatgtcaaaaaaagcacttattgcatggataatgtgacaaatagtttcaaaaccaaagcatttattgttaaacagcaataaggtaaagcgcacgaatcgctaattttgatattaacattggtgatagtcgttatatttgattattaacgtcatcgttaaaataatacgaataaatcattcaaaaattttaaattaaaaccggatgaaaacaaataaaaaagccggtttattttatacaaaccggcttacgggtaaaaaccatcagattaatttatgtcatatacggtagtgatgcttgtccagcccgtactttttcatccgcagatagagttttttacgcgggatttgcagatactctgagacatcgttaattcgcccctggtggatattcagggcttcggtgataatctgccgctcatagctctccacccgctggtccagcgcagtcggtgccacggacggcagcagcgggttcgcggtatcacccatcggcataatcccgaccgcatacagctccgccgcgttcgccagttcactgacattgcccggccagtgccgccgggtcagttttttcaccagcggctccgcaaggttcggcagcggatgattcagacgggaacaggcctgttccagatagtaacggaatatcggtgcaatatcggctttgcgctgggacaacggcaggcaggcaatctgtgtcatggagaaacagtaatagagctcagcgataatcttctgctgtttggtcagcataatcagcggcgtgtcggcaatcccgatcagacggaatatccgctgctcctgacggatatgctgtaccagccagcgctgctggctgagcggcatcagatcgatatttttgatcaccagtgtgccgtccgtcacttcatccagccaggcatccagcgggatctcctcatcactgagcagggttttgatgaccagcggcccgcatttattgctgcttatctgatgcaggtagcgcgccagataggtgcggccgctccccggctcaccatgcagaaagaccgcagcacgggtttccgccagtccgcgcaactgctggcggacgtgctctgtccattcactctcaccagcaagattcagtgtcagctgctctgagctccagcggcgctgggttacccgctgtttgcgggctgccagagctttttctgtcagggtcagcagatgctccggatccaccggtttctgcagaaaatcccacgccccttgtttgacggcttccaccgccatcggcacatcaccgtggccggtgatcagcagcaccggcagatatttgtctttttccaggaacaatgccatcagatcgatacctgagcaccccggcatacagacatcactgagcacaataccgcaccagtcgcggtgaaccagctcttttgccgccagcgggtcatgacaggcataaacacgatatccggcctgctccagcagcatacagtaagcttccagtacatccgtatcatcatctattaataagatatcgtagttatcatcaagcatattcagttacctttttaaaacacaggatcacacatccgtggcgggtcagcgtggatgcgatccgcaggctgccgcccagctgctgcataatggagctgctgacagacaggccgatcccgaggccgatttctttactggtggtgaagggtttcatcagtgagtccgccagcgccatcggccagccgcagccgttatcactgataaagagagaaatctcatcggcggactctgtaaaatcaatcacaatttcagctgctgccggtgaggcatccagtgcattggagagcatattgaccagcacctgctgtatgccgatagcatccccctgcacctgcggcagaaagtccggctggtgcagggtgacatcacgcattttgttctgtaatgcgaggatatcccacgcatcctgaatgctctgatgcaaatcaatcggctgcagtgtcgcgccgtcatcccgccgccgggcaaactggcgcagagagcggataatgccgtccatccgggtaataagctgcgcggatttattcagggcattcacggcattggtatttccttccgccgccagtgcccgcttcgccatataaacgtgcatggataatgcattcagcggctgattgatttcatgcgccagggtggtcatggtctgcccgaccacggccagtttcgccgtctggatcagctcattttgtgtagcccgcagattggcctcaatggcttttctgtcggtgatttcctgttccagctgcgctttctgccggttgatctggctgagtgtctggcgcagcagcatggccacacggccgatttcatcgcgcccctcaaccgggatttccgcggtcagatcaccgtgtcctatccgtgcaactgcctgattcagcactgtaaaacgcctgaccagccgggtgcggataaaatagtggttaaagatcaccgccagtaataacgccaacagcgcggtaataataatgataatgccgctgtaactcataataccggacagatgatgattcagagactgtaactggctgtggctgttatcaagctgcacatcgagctgtgtacggaaccgctccagaatgcgatctttttctgccgtggcggccgccagctccgctttcgccgcgcggtaatctttcagcacaccgggcattttgctgtcagacagaccgatatccagcagttcatcaatagtctggcgcagtgtcacggtgctcggatacatatccgacgccgtttcgtttgattccgcaccggacttcagataggaaagataacggacataactgtgcgaatctgcgctgctttccgtactttcattctgttcatcccgcagacgcccggtcagatcatccataatctgcccctccagccgtgccagggtataaatcagctgtaactccccctgcactttgcgcagactgccctgcagggcgatagcccgggacggatcctgctctgtctgatccagcagagagccctgctgccagctgatatcctgtgacagcgaactgagttcggtactgaaatcatcatgcagccaggcaatccgcgcagacagcgtatttacattctcccgcgccagaaacagggtatacagggcattatcgagacgctgcaaaagcgcctgtccctgctgcacaatcgcggcgatctgtacctgatcctcgccgctcagtttccggttgatcgcttcgatctgtgataaatgaagcgtgatctggttgcgcagctgcagacgtgctgcagtatccggcgctttcaggaactcattcagctcatccaccagcgtgttcagttgtccctcgatcagaaacgacgcctgaatacgcggaaaataatcccccagcgcgtagcggatctgacggttctgcgcctgccaggcgtacaggctcacacaactgacaatcagtgtcatcagcgtgccgataacaaacgcgccgcgcaggatcgcgctgatactgaaacggccgatataacgggcaatacgctgtttcaccggactttctccagttccgaaatcgctttgcgctgttgctcgcggaagaactgctgccagcggatatactcttcctccgctttgcggttatcgtcaaaacgtgagtaataggccgggtcggcactctcctgtgcagagaccggcatggcggtcagcagagcacggatatgcggcagcgggcgtttcacgcgggcttcggcggtatacagggcacgccaggcgtcgatggattccgtcagacggaaggtgatcgcggtatcaaacagctgctgtaccatacgctggcgtttgagcaccagattctcatccatctgatgcggggaattcagcaggcggcgctgcaccggctcacgcggatttccctgcggcagcggtgtgacaggatatttaccggtgctgctgtccgccagcacgttctgcccctgttcactgagcaaaaaacggataaaggcgcgggccttgtctttattcagactgtgacggcttatcgcgacgaaggtcggggatgtcgcggaatccggcagataattaaaggccagctccggatcgcccagcagcagccaggcgtagttatcaatcaccggcgcggcaccacccagccccgctttgattttgtccgccaccccgaaactgcgtgacgagatagtcgccagattcccggaaacattgagcagcagcgcccagccctcatcccagccgcgctgctgtaacagcgattcgaccatcagatgataggtatccgaacgtgacgggctgctcatcagcagcaacccctgatagcggctgtcggtcagggaatcccacgatgccggaaccggcagattattttccgccatccgccgtttattcaccagaatgccgtaaccggaaaacgccaccgctgccgcattatcgcgcagccgcagcggtaccagacgccgggagacctccggcagatctgtgagttccgccagccggtcatgttcctgcagatgttgtaataacatcggcgaggatgtcaccaccagatccacatcttccagtgccggggtatccagcagacgctccagtgccgcactggtgcggttaatggtacggatacggacagcaccgggctgctgctgccagctgctgataatatgggctgttgcttccggtgaaaacgtggtggcgatcaccagttcatccggtttcgccgtggctgacagactgaacatcagtacggcggcggttatcatactggccgcaaagcggcggattcggcgttgtggcataagctgggttctgtattcgtttgcggggtgtgattcacatcataaaaatgacatctttttcagtttgtcgcaaaagtccgtttgagacaaatattacccgtttgtttaccggcatctgcgccgcagatattaaataaaataactaacaggaacggtaaccggcctgatattttaaatcatcgccataaacagataataacaatgcaggaaataataatagcaataaatcaccataacaacaaaacaagaataaaagccttacagttcaatataaaagctgttaattcattttcacttatcatttgtttcattcattttttctttcatttcatggtgatacaaaacaaacatataaataaacttatttgtgtcagtttatgccttttatatttaacattgagtcaaaagtgactcaaaagcatgatattgagatatttattcagccggaacatgataaccctgtcagaaaaaaaacgaccatacacacagtaatcctattttaaaatacatttctgcaggtgaaattatgctgtcatttttaaagccggctatggcaaaaaataaagtagcacccggaaaagtgcccgccacttacaaacgttatcgtgttcaggcattgctcagcgtgttcctcggttacttagcgtattatattgtccgcaataactttacgctctccacaccgtatctgaaagaaaacctcgatctgaccacaacgcagatcggtatgttaaccagctgcatgctgatcacttacgggatcagtaaaggaattatgagcagcctggcggataaagccagcccgaaagcctttatggcctttggtctgatcctctgtgccgttgttaacctcggtatgggcttcagcagcgcgttctggctgttcgtcggtttcgttgccctcaacggtctgttccagggcatgggcgtcggtccttcttttattactatcgccaaatggttcccgcgccgtgaacgcggccgtatcggggctttctggaatatctcccacaacgtcggcggcggtatcgttgcgccaatcgtgggtgcggctttcgcggttctcggtaccgagcactggcaggcggcaagctacgcggttccggcagttatcgccgtagtcttcgctgtgatcgtcctgctgctgggtaaaggttctccggaacaggaaggcttaccggcgctggcagaaatgatgccggaagaaaaagtggtgttatctgatgcacagaaagagcagtctccggaaaatatgtctgcatttcagattttctgcacctatgtactgaaaaacaaaaacgcctggtatgtctcttttgttgacgtgttcgtgtacatggttcgtttcgggatcatcagctggctgccgatttacctgctgaccgagaaaaacttcagcaaagatcagatgagtgtggccttcctgttcttcgaatgggctgcgattccgtccaccctgctggcaggctggctgacagacaaactgttcaaaggccgcagaatgccgctggcgatcgtctgtatgaccctgattttcttctgcctgatcggttactggcagagccagtccctggccgtcgtcaccttcttcgctgcggttgtcggttgcctgatttatgtgcctcagttcctggcatccgtgcagaccatggaaatcgtcccgagcttcgcggtcggttctgcggtaggtttacgcggtttcatgagctacatcctgggtgcaaccctgggcaccaccctgttcggtttcattgttgaccgtatgggctggcacggcggtttctatctgctgttaggcggtatcgtctgctgtatcatcttctgtattctgtctcacttcggtgcgctggaactggaacgtaaccgccagcaggcactgtcagaagaaaaagaaacaaaaatcaaattagaacctgcttctgcaaactgatttcacactgttcgttaccctttcgcgccgcggcgctgacatcaggaacgttattgataaaaaaaaatccccctgtggcaacacagggggatttttatctcagcggttcagcttatttccactggtatttcacgccgatcatcgcacggtcaccggagtaatcatccgcgcccatctgatgagaaacgttaccccagactgtccagtttggtgaaatctgcccttccacaccggctttgatctcaaaccggttcgccggacgatcatcactgaaggtgtagtgtttattaaaggtcatatcactcttcgccgtactgtgcagccagtttacctcaacaaacggctgcgcggatttatctgactgcttctggtttgcgtaggtcagacgggcccccagacgggtatccacactgttactgcgcccgcctttcatcaccagaccggtgccgctgctgctgtcatcagaatcatacgaattaaagataacctgcgcctgcggtgttaacagccactgtttatccgcatccggtttgtacaccgccatgctgtagccggtttcaacagaagcactgactaagcggctcttataatccgatgaactgccggccatggagactttattatcaaaccaggaatactgtgcccagacatccgcataggcattgttttcatcttcgcggttctgataccaggtgccgtataaaccgacgctgtaagcacgatcaatttttgcatcggctttcgtaccggtccgtttagcgctgctggtgtaatcagacttaccgattgcgcccatgataccgccgcggatcgtagtgtcctgtgcatcattgttccagttgataatatcgccgcccagctgggtggtgtaggtatcccctttcagacgcagtgaacggctgaccgcatcctgacgctgacgatccccggtgatacgcagccagacagaagaggcgttttcatcccctttaaagctgtcggcatagtgcggctcgcccaggcgatcatgcagggtcatggagaacatgcccagtgccgccgtgcggttagccatgtgtccgccgatttccgggttcacgttacggttcggatcttccttgttttcatccggcggatagacattggtatcgaaagagtcgagataccagctgtcatctttataccctttgtgtaacagatattcgtataccccgatagcaaccggcccgcccagtttaaaggcatttttatcggattttccgccgacatgaaccactttaatcgcatccggctgtttcagggtatcagcaccttcgccaccaacattattaatattcagcgtagttgcgccgtttttcccggtgtacacattaccgtcaaccaccagctggtcagtcattgtgtcttcatgacctctgttcagcacggtattcagtgtgatcgaaccgccgttcgcagtgaaatccccgccgacattcagacggctttcggtttctttctgactcgcaagccagatgctgccgccgttgttgacaaagttgccgtcaacgcggtaatccgttgcctgtccgagatctttcttatccggttcaccgacatagaactgaccggcgttattcacgctgcctttcagtgtaccctgaccggcaaatattccctgagtgccgatattcacctgacggctgttcatcaccagtgcggaatcatagctccccgcctgtaatgtgccgttctgaatctctgttgcaccggtgtactgtgccgatttatctgtcagcgtgatacggcccgcgccctgcttcaccagtgtccctgtcccggtgacactgttggtcagatcccacggctgtttgccgtcattgtgcgtcagcaccagcgtaccggcgttttcaattgccgcgctgccgatatgctctgcctgtgaggcacgcagtgtactgtctgcatccgtggtgaaacgtccgctgaacccgctgttatctgccgtcagctgagcatccgatttctgtgcgatttcggtggtgccgctgccggtcagctgattacgcagcagaccctgcgcgccttccgtgcgcagtgtacccgccacggcgaccaggctgtctcccagacccgcgatattacggatagtgacctgtgcaggctgatcgatagtcactgcggaatgcatcccgctatttgccccggtgacagtcagtgtgtcattattcaccaccagctgacccgcctgagtaccgctcagagaaccgtttacctcaccgccgtttttcaccgtcagtttgccgttacccagcgccaccaggctgtttgccgcagacgtgagtttcccggcagtctgctctgtaccggcaccggtggtgctggtcagttcaactgcggtaccggataccagatccagtaactgcgtattccctaacacattatcggcttctgcccgtaatttgccgtgacggacaaacgtgctgccggtgtaatcattgctgttattagacagagtgacgtattcacttgcagtatcaattgccaggtcgccctgtccggtgattttcgccccgaggttagccgccgatccggattttccggactgtgctgccagcaccagcgcatcactgcctttgccctgcagatccacctcggtcagctgataagccacatacaacccgtccgctttaccaccggcgtttgcactggtctgtaagccgtaatcataggtgcctttcgccaccactttaccgtcctggcgcagatcctgctctgtcttcgtatttgacgggatcacattaccgtctttatccgtcagctgcagattcagcccgccggtgtaatccgaggctttaccggcattgaccagctgaaccacggaatccccttcatcctgctccagcagcggcactttgttatccgctgacggcgttggcagattatcaaaaccgtccgctttcacctgaacagtgcctttcgcgttatccagttcgagggagttcacgctgatgtgaccatccgccttgctgctgccggtgatattgtcgttaaaggccagtgtcccgccgctcattgccaggcgatcaaatgactgtgtgccgacgcctgcgcggacggttgcaacagatttatcaccgatatccagacgggatttttgcagcgcgcgggtgttatcaccggcgatatcaaatgtgccgtttgtcagacgcagcgtgccggtgaagttatcccccgcaaaagccgcgctcttattattaaagtcaaacgcctgacccgctgttgaggtggtgaccagaccatccccctgcaactgatgggcaaaggtatcggctttattctgattgataaacagctcaccgccctgttttacggtgataccgtcatctgctgtcagttcattcagcgtgatatcggtattgcgcagttcaaaacggccttcctcaatattcagtttttcaaagccgctgattttgctgctgtcctgtaatacatagtggcttgctttgccctgcagcgtcagtgcatcctgtccgccgctgcccgccttcagattgccgaacagggcatcactttgtgcttcagaaacatttttcagaatcacattgttctgaccattaccgacagtaccggtctgtaatttggtaccgccgttcagtgtcacggtattgttgccgttaccggctgtcagaatgccggttaccgctttttcgagcatttcaatggtgttatcaccgtggcctgtcgcgatatcactggtgttaccgctcagcgcgatggtgttattaccgccgcccagcaccgattttccgctgatcgtgccgccgttggtgaagcggatattgctgttctgatgtgcatccaccgccataccgctggcaccggcagtcacagtgccgctgttggtgaagctgaaatcgtttctcagcgcagtcagatccaccacgctgtggtcagatgctgacgtcagtttgccgctctgtgtgatgtttttagtcccaccaagcaccaccagtgcggattccccttctgctgattcgatattcacattcattccgctgataacatcaccggaagtattggtcacaataccgttgccgcccttatcttttacattgatagtggtgccgccggcgccggaggtgtcgagcttgcttttcgccatcatcaccccgcctttgccgtcatccgcttccagcttcagaccggaggcattctcaccgctgacattgatggtgccggtgccggacagtttaaacgcgccgctgtcatcatctgtattcagcagatgcagaccgctgccactgccggtgacttcaatattggcgttatccagtttcacgtttgagccggaatgggcccgtaccgcatccgccgagttttcaccgaggatcttacctttgccgccgatggtcattgaggcatctttattcagacggactgcggcggtaccgttattggcggtaatattaccggtgttatttaccacggaattccggccgtaaatatcaacacccacaccattcacggtaatatcggtggtgttattaaccgtcccggtttccacacggatgccggtggcgttatccgctttgctgaaatcaatattaccgtcgtgattgagcacaccgccgttgatcagcttataaccgatcgcgtttttcgcgatattgtcatcggttccgcctgatttcaggtgtgcttttgaagtcagtgtggttttatctgattttttcccggtcgcattaccattaatatcgtaatagttaccgtcaatcaccgcgatggttccgccttcgccggtaacactgatggtagtctctttatccagaacaaccttaccgtccgccccggcaccattagccagatacagcccggtcgcgtcgttcccgttgacattcagttgcatattgccggtttttacttcagtaccgttatccgcaatatagaaaccacggcttttttcgccgttgatatcaaaggtataagttgtgcctttgctgctgtcacccaggaactgcgctttctggtcaacacggaataacgtggaatcgttattatccagtgtcagagctacatcacttgcgccgaaattgatccgcgaactgaaggtttcatctgcccctttacgcccggcgatccagtaaccggtctggttaatggagtttttatcaaaaataacgtgaccgctgttaaggtcgatttcaccgcccacacgggcaaagaccccgacggtgttattgcctttcagctcaacggttccgccgtcgataatcactttcgcatcatccgcgcgtaccccggtagtgcgtgccggtttggtgccgccggtggtggttccgttgttggtggcaatcacctgcccgtggtgagtaatcgtgctgtcgcccagcgccagcaggccaatcgagcctgccccggaaacattaatcgtgccgttgttttcaataacatccttaacacggttcgtgcctgacacccgcataccaacagtattggtacccgccacatcaatttcaccgttgttaacgacagtcagctgtgaatccgcattacggttcggcgttgatgccacgttaatgccgaccgcattactgacacctttgttaatatcgatttttcctttgttttcaatcgcatatttttcaccggcttttgcggtttcatccagcagtgcagccacggcgttcgacataatccgcatatcccaggtatcgtcttcacggccgccggacaggctgacatcgtctttacccatcagaatatcgccgttattgataaatgaagcgcccttgacctgcacgccggtcacggttccttcatttttgccgatccctttctgccccagcagcagtttgccgcccttttcgttggtgaccagagaaccgccggatgcagtcacaccggtgttggcaattacatctttatctgtcggatcattattgacgaggttgaaggcttcaacggcaatggtaccaaggttggtatagtgtgcattttcaccggtgacctgatcaccgtagatgcgggttttaccgtcgcccagcagtaacgtaccgcggttggtaaattccgcattgtcgattaacgcattctgccctttgtaattcggcacagaggttgtggcatcatggaatacttttgcgccatcatgcgcaaaaatatggtacgcacgataacgacctgaatttgatgaagtttcaccacggatatccgcaccgtctttaatattcagcacactgccgtcaccggcggcctcaaaaatggagcgttttccgatattggcggtaatggcgtcattcagacggatatctttatcttccagacctttcaggtcgatattaacgtcaaaataatctttatcctgcggacgcgggacaaccgtcgcttcaatcagcgctttgtattccgccccgggtaatacgttatgtgttactgcgtcaatcagtaacgcgttatacgccgccagtccctgtgcattgccgatggcaaaagtgtcaccaagggcatacgtttttcctttcgatgtgaacccgttcagctcttttgggatagcgacactctcaaccagttcattctgcggctggaaggtgtatttgtattcaccggaagataaatacatgccgtaagcttcaccgaacgtaacgtgaagtttgctggtggtatcaatagtcgcggattttccgctgtctgcggccgccacaaacagtgaactgtctttgatgtaattgatattccagtcaacattgtcagccgctgtcatattcagcgtaccgtctttaacttctgccagtgtcagatgatagaacggggataattccggctgtttttccagcagatacacacccagctgcggatcgatgttttttttgaaggcatcggtgttgtaggcctgcatgacggcgatttccccgtcttccttcttccaggtaatttcttccatcgctgacgggttgtccgggacctgccagtcttcaatcgcattcagggaagcgttccccggaagcggctgtccatcacggtattcggtaatcgaaataaccttatttgcatccgtgtttttcgcccataattcctgcaatgaaaaccaggtttcatgataatcaagattattggtgaatttcgtcttttcattatttaaattaagatctttaacgctgccgtcattaataacccgggattgttctttttcgtttgaattatttacccacgttttagttgtgctgtcatattgcgcagggcgatactcagtttctaaccactggcccgcaggatcagctgctggtgcagacacgctcagcccgcagcccatcagcattgccagtgataacagcgccagtttttttcctttctttgcaccctttgcgaattcagatgcgacaacagaattccctgtccgttgattttttacgactttgaatattttattcattgtttatttttctcaaaattgaaggacgtgaataaggaaattccaggtgcagaaaaccctgacgcatttaatgcatcacagaaaaaaatgtgccgtcacctgagcggctgacggttatcagcgtaattgggttatttaattaatttatttaacgttcacctgaattgccctgtatccggactcagaaaattttacttatggttgaatcggcggcgtattatagagaggggatttcgaatgtctatagcggttttaggaatcatcctaagcgaaattcactacaaaatgatcataaaaagataaataaccacaaaattacaaattggacgcgtaattacttataggtagtactgattatttttttgatttccctcacccgaatacagccactcactgacatttaatgtgtcaataactaaaataatcgaatacttaatttataataagatttatttttggatttattaactaatcattttgcaatgtataattcattcaatttgtttccaaacataacgtaatgcatacttccgttacattattacgtgaatttttattcatgaaatatgaatttaaaaaactttagctttttttggattattttttacaaaaagcacaaatagctcattttacgtattaaacgcgtacagactttaactcacaagcagctttcgtgatacaaatcacagtaaactgccgatcaattaacaaacacaaataaaacaaaaaaataacaaaaaagcgctgccagcgggaaggcacctccgttatcattaagctaaattacttatttgaagtgtttaaagtaagagctttgccttatttaagcggttaagcacactattttcgtcatataaccaaaaatagcagtgaaaaatagcagtgcaggagaaacgcagaagagcacttccccacgatcaaatacgcatttaatacgtataacgatacaaacagcaggtactactcagatcgtacctaaaacaaatgtcccttcaccagaaaatgcattttcatgcattacagacctgaatttgattcagttattatgcagcggtaaatagtgcatttatgcataaaaaaggttatttatacggcaaaatcaggctctgttataataaggaagtgacaacaggtaacaggggaaacggacgcagcatgacgatttttgacacactggctgagcgccatattcaggcggcgcttgaaagcggagaattacagggactggcaggagaaggtaagccgctcacactggatgatgacagccatgttccccctgaactgcgggtgggctaccggttgctgaaaaatgcaggatatcttcccccggcattactggcccggcaggaggcggtttcactggcggaattattgtccgctctgccgccggacagcgcagaatatgagcagacaaacaagcggttacggttgctggcattacagatgcagcaggcggggctcaatacggattttctgtatcaccgttaccatgacaccatacaacaggcactgaataaaaataaataatgcctgcacgtcagtacagttcataaatctgatcagatgtgaaaccccggtacatcaggtaacgcatctgtttttgcttctctttatagtctgccgggctgctttccccgaatttcttcatttttgcctcacgggcctgctcaaaccagtcggtctcctgcgcggaaaaaaccgcatcaatcaattcaccgccaaaccctttctgacgtaattcctgacggatccgcaccggtccgtgcagttttctcacaccggcctgaaaaaacagcgcgatactgcgggtatcatccagatactgtgagtctgtcagccgcgccatcacccgtggcagaacatgctcttctgtcggggaggtttcctgcttttcagcaattttccgtttcagtttgcgggtcagttccgcgccggcatattcccgccgtcccagcagccatatggcataatgataaagttgtttttcatccatcgtgacacctgcgtgttatccgttaaaatcgtgataacataccatattcacactatattcagagagacagacaatggcacaactgacccaggaagaaaaagtatatgttgatgacctcgcgatgcagcgggttgatgatatgaacagcgatgaatttctggttcgtcagctggatgacaaaatccacgggctggcatctcacctgaaagcctattttgaagaacgtctggctttccataaacagaacaaaaactgatcctgcccgggcagccgcaacgctgcccgctgcttttttcccacctgaaataatcgccatataaataattacattcgttatcagtctattccgatagttatcctgctgcacttaaaataaagttgaaaataattaaagttccctgtgaatgtgccgataatcattaccgggagcattctgagtgcttgattttacgttgttaatatcgctaatgataattattcttaattgttgcaatcaataatcataaagaaaaaataatattaaatacttcattttttaacatatattaaatgaatatttaaaaatattaacaacaatcaatgcataacatcgcaataacataaaaatgcagtatataaaaccataagtaactatctgtatccggatattacagagaaaactcaccttttaattcgtaaatcagaaaaatacttcaattaatcatttcatggttatatactctgtttcgttttagttatgccttccattctgatgtataagaatcttctttcccgttaacggtaataaaaaattactggggaaattatttcttattgatgctactaactaaataaaccctgctgatttgttttttcagaatcggctaaaaatcactatgactaaaaataaatttacggaaagcgtaattaatttcgtttccgtatttattatatattccatcccggagaggataatgaataaaaaattcgctcttgcagcgtctctttcccttatttttgttgctaactctgcgtctgcggcaactaccgcatccggtggttcaatcaatttcaccggctttattactgatgctacctgcaccattaataacggtaatgcgaacatgtcggtattattagatccaattactgtcaatcagatcacacattccggcgcaatcgaggaaggaaagaaagcattttctctcgagttatcagactgtaacgccagtgataaagataaaaaatcactgcatattaatttcgcctccaccaaccttattgccaataacggtaattacctgatcaaccaggaaacggatgagaaaggtaatcataaaaatgtcggtattgcgttaacatcacagaaaagtgatgaagttattaatttaaacacgccatacgatacaaaaatcattgctgataatggtgttatgcagttctatgcaaaatattacaaagtcggcagcgaacctgctcagccgggtaaaatcaataccatgctgacatataatctgtcttacttctgatattttcaggcctctttaattcaggggcctgatttttgaaaatacacatcatgaaaaaaatcatcttaacattgttgttattaacagtgacatttgtcagtccggcaaacgttattattaattccacccgtgttatttatccgcagggaagtaaagaggttccggtacaattatttaacaccggagcacagcaggcattagtccaggcatggattgatgacggcaaccccgattccacgccggaaacggcgaatgttccgtttatcctgacaccgccggtggtaaaaatcgacggtaaaaatggtcagcagctgcgggtgaaaatgaccccggtacagcttccggctgacagagagtccctgttttatctgaatttactggatattccgccgctgccggaaaacagtgccgataaaaacatgatgcagattgctatccgctcccgcatcaaactgttttaccgcccttccggcctgacgctgagcgcggataaagtccacacccgtctgacattcacccgtgacggccagcactatattctgaaaaatgattctccgtatcatattaatattctcggcctgaaagagaccgcgaacagccgtgatctggcggaagaaggcacgatgattgcaccttattctcagtttacgctgcctgccgcagccggattaccggccggaaatcactattcgctgacactgatcgacgatttcggtgccatcaatacctatccgctgtcactgaactgaacagccgcctgatgccgcgccctgtccgccgtttttccgcccttgtttcactgttgccggtgctgctcagcacaccggcagccggggccgggtttaataccaacttcctttacggtgattccgccaaagcggatttgtcccgctttgatcgcgacgataccctgcccgacggtgaatacaccgttgaaatcagtgtgaacggagaatggaagggacgatttccgctgcgtctgcaacagagcggacacacgattctgatcccgcaggatgatgtaccgaaactgggacttcgtgacagtacaccgccgccgcaggcggatgaagacggctatgtcgtgctgagcagtctggtgccgccggagagttataccctgaacaccggacagtttcagctggcactgaatgtgccgcaggcaatgctgaataccgtacttaaaggatatgtcgacccgtcgcggtgggatcagggcattaatgccgcgatggtcagttataacgctaactattatcacgccaccaataaacgtgacggcagtgataacgacaatgcttatctgaccctgagcagtggtctgaatctggccggctggcagctgcgggatcaatcctcagtgacctacagcagcggacaaagcacgcaatggaataacaacacccgttacctgcagcgtggttttccggcaatcaaatctgatttccgggccggcgacagctacacctccaacgaactgttcgattctgtccgtttccgtggcgcgaccctgaaaacggatatgcgcatgtatcccgatgcctggcagggcttttccccggtcgtgcgcggcgtggcacagaccaacgcactggtcagaatctatcaggattcacagcttatctggcagcagagcgtgccgcccggcctgtttgtggtcgattccctgctgccgaccggctcaggcggggatctgcaggtggaagtgaatgaagcggacgggcaaattaaccgctttatggtgcccttctccgctgtgccgaatatgttaaaggaaggactctttaaatatgagctgaatgccggtgaagtccgtctgacagataccgcttatcatccggattttgcgcagcttaatcttcagtacggcattaataacacgctgaccggctacggcggcgtgattgcggcggaaaattatcaggcgtttctgctcggcagcgggtttaacctgccgatcggtgcattatccgtggatatcacacactccgatgcccgcttcggtcaggatatgccgcgttaccggggtgagagctacaaagtggcttacagccgctttattcatcagaccaataccaatttttcactggcggcttaccgttattccaccagcggttatttcagcctgacagatgcggtgcagtatcaggaactgcttaaccggcaggacattacaggcgatctctccccgcagtcacagagttaccgccagcgcagtacctttaatatcaatatcaaccagcggatcggtgcggattacggttcggtttatctcgccggtacactgcgtgattactggggcggccagggcagcacccgtgaatatcagctgggttatgccaataactggcaggatatcaattataccctcagcgcaggccggacccgttacagcaaagacagtaacaatccggccggcagtaataataatgaagagacgcggattaacctgacactctccgttccgctgaccttgtccggccacaaggtgtatctgaccgcaaacagcatgacggaagaaggccgctatcagagcagtaatatcggcctgagcggtaccgccggacagagcaacgcgctgagttataacgtgaatgccgctcatcagcaatccggcggtacaaccttcagcaccagtgctgcctaccgggcggccccggcgacactgaacgcctcttacagtgaatccggccgttaccgccagatgggagccggagccaccggcagtgtggtggcctggtccggtggtattctcaccgcaaatcagccgggggaaacctttgctgtggtgaatgtaccgggcaccgccaatgccatcgtaaacaatgaccgtaatgtcaccaccaacacgcagggtcaggtgctggtgccgtatctgtccgcttaccgcaaaaactcgctgatcctggatgcctcacaggcaccggaagatgctgcggaactgctgggcaatgtgcaggatatcgtgccttacgccggggcggtgacactcgtgaacttcagaacggatacccggcaggaattttatctgcatgccgtgcgtcagaacggcagaccgctgccgttcggtacagaagtcactgacggaaataataacagcatcggctatgtcggacagaacagcctcctttatataagaagcgaaacgcggccggaacagatcaatgtccgcctgacagatacggacagcggctactgccgcatcacactcacgccggatccgcagagtgcgcctctgccctgtgcagaataaaggagacatcaccgatgctcagaaaaacccatttttttgccggtctgctgatgctgatcaccggttatgcgcaggcagagtgctacaacgacggcaacaaacaggcgccgccgctgacagctgatctgtcggaaaccttttaccgtcagacagaaaccaccctctattttaatacccgctacagcggggaattcagctgtaacggctacagcagcagcgtctccaacgcctcttacctgcaaaaacgttccattgtggtcggttttcagaacggccgctatccggtggagttccgggtgatcgatctccagcccggcagtacccaaaaattcgcttacagcagaaacccgtacccggcggaccgccttcaggcacgtttcaccctcagcgcacgggtgatgccgcagaactcacgcagtgatgtgacggtgcccggcagccagtaccgctttgacggcgcggtgatcgctgcggataccacccgggtcggcatccttcagttctttgtccgcctcgggctggatatcctcacttatctgctgaccggacactggccggaacataatgaggatctgttcctgcagccgctggatgtcatttatcagccccgtgaaaccacctgtacctttgataatgcggatttattagtcgaactgccgcaggtggacagagcacagctgctgcgtaacacaaccgccgggatgacacgtttccatctggatatctcctgccgggatcgcctgaacggccgcaccagccgtccggtaaaagcctatctggccagcaaccaggtctggctgcgggatatgaaaaccctcattgatacctccccgggtgcggcacagggggtggggatccgcatcggccgttatgcggataccaatgacaacagtgcactggtgatcaacccgccgggacggcagccacgtgcggattcctatctgtttgaatggggaaaggacaaatttattgaagtaaataacggctttaatctctgggcgtattactatgtctatgatgctgcccggctcagtgcaggccgcatcaataccacggcaatcctcaatttcgagtactactaatcataaattctgataaaaatggccggtaaaaaccgcagaaaaaagtgaaaacggggcaggacactgcgtaaaaaacattaattttccggataattccgccatttttgccaaaatccgcagccgtttgatgtccgttttaacttactaatagacatacataaaatcagaaaacagaattttatcctgccaaagcatacccgattaatattaaacgatggataataaggctggccttggtttttctattttgctagtattcgttcgatttttgttcagacaataaaacgaggaaaaagcaatgccctctctttcgatgaggacaaatgcagtcttcgctttcttgattttactattctttaccggttcgggctttgcctcaaccagtaccacgacaagcttggcgtattcacatcaaaacacgcagcagttacagaagacgctgcctgatttgaaaaaatacgcgtcaggtacaccccgtaagaaagcgtttttaaatgccattgtccctgcgattgacaaagtgaatcgcgaaatcatgaatgaccgcacctggttactggaacgccggaatgccaaacactggtcacagagtgatattgcaaagctcggaaagctttgccggagctatgatatgacatgcagctcgcctaagcgcaccaactggaacgcgctgctgagccgtgtcgatatcctgcccacccacttcgttgccacacaggcggcaaccgagtcaggctggggaacatcaaaactggcccagtccaacaataacctttttggtatgcgttgcggacggggctgtagtgccaaagccggacaggttcagggctactacgcgtacagcactattgaggatagtgtcactgcttacatgaagaatctgaatacgcatcgtgcttataactcactgcgttcagaaagggcaaaacagcgtctgggtgatgatgactcactgagcacaccggaacttatcagtcagctggaaggttattcgcagaagggagatgcctataaccgttacctccgccagatgtatgacagtaacaaaacactgatcacatcggcacagaaggtcgcccaaaactcataatcgttctgttcactgcaacagacacccgaaaacccgcgttaatctgagtattacgcgggtttttttatggcttctcatcattcttattgaatcgtggttgataacttatattatactcagcacgctaattatgacattttcaacaagcctgcacagagcctgatatgaatttcttttcatttgaatttcttgcctcctttactgccttttttctgatttactggctctgtcaaaaaaagccccgtttacagaatatccttttaattacggcgagttatctgtttgtcttcttattccgggcaagcttcgcgtatgtgctggccggatataccctgtttatttatctgctgacgaatgtcctgagcagccgtctgtccgcacgggcagtttacagcctgctggcggcggggatcatcggctgttttacggtattcaaatactacggatttatgcaggaatctctgcagagcgcgctgctgcaggccggtgtggaggttgaactgccggtgctttccgtgctggcgccgctggggttatccttctacgcgttccattctgtcagctatgtggtgtcggtctgccgcaaagagattgaaaaagccccctttttggatgtggtgctctatctctgcttcttcccgagcattgtcgccggcccgataaaccgcgccaaagcctttatgccgcaggtacaggcggcctcgcgggaaattattgattacaaaaaagccctgctgctgatcaccctggcgatggtgaaactgtttttattcagtgcttatctgtcagaaaactttgccaacccggtcttcagttcgccggtcaactacagcgccggtgagattctggtggcggtgtacgcctatgcctggaatatctattttaacttctccggctataccaacctggtgaccgggattgccatgctgcttggtttcagggtaccgctgaacttcagtgcgccgtatcttgccaccaacctcaaagagttctgggcgcgctggcacatcagtctgtcgacctttatccgcgattatatttacatcccgctcggcggtaaccgcaagggctggctgcggatgaacctcaatgcctttatcgcgatggtgatttcagggatctggcacggtgtcgggctgccgtttatcatctggggtgcactgcacggcctgggtattgtgctgatgaatatcaaacacaaactgctgccgccgcgtacagaacctgcggaaaccctgtggcagaaaaccggggtctggaccgcccggattttcaccttccatgtgctctgcctgacctggattttcttccgcagcgccacgctcagtgatgctgtcaccatgctgacgcaactgaccgccgacggctttattgcctcagtgatagccagtgcgccgctgattatcgccttctggctgctgctgtttatctatccgctgtgtgtcagcctgtatcaccgcgccggacactattaccagcggatctcatggatctggtatcctttaccgctcgcgctctttatgacgctggtctttattttctctccttcaggaatgccgggttttatctatgcgaatttttgattttacagaaaatctcgagcgggcactgaaggtcgtctttattgtgctgaccgcaaccgtggcactggtctggctgaaccagaacccgctggcccgttactgggaacaaacctaccaccagcctgcgccgtgggcgaagctggaggggcattacgcgtgggatctgggaggttaccttcaggaaggcgtggtggctgccggagagaccctgtggacctatgcacagggcaatcatatcgttgaggaagcggaagaggctgttcccggcaataccgcgtttccggaggagtttcaggtcgggctgcattttatcaacggctaccgttatccggccgctgcactgtctgtgaccttccctgagctgctgaaccgggagcgtccggcgatcggcaattctgtgctgaaactgaacccggagcaggttgcggaacacattctgacgaaaaaaacaccaaaatcaattattgatctggaagccggtgataaagtcttcttcgtgggcgattccctcatgcagggcgttgcacctgtgttacaatcccgtctggccaaaacctacggcattgaaagtatcaacctcagcaaacagagtaccggcctgacgtatccgaagtttttcaactggccggaaactatcaaaaccacgctggcagccaacccggatatccgcctgatggtggttttcctcggcccgaatgacccgtgggacatgccgccggaaggcggcgggcgctacctgcgctttatgtctccggagtgggaggcgcagtaccgtaaacggattcaggatattctgttaacggcccggatacaggatgtggacgtcatatggataggaccaccgaatatgcgcaaagacaagctgtcagatggtgtacactatctgagcggggtctatcagtcggaaattaacaatgccggtgaaatctggctgtccgcgaataccattttcaaatatcaggataagatctattcagattaccccggtgacggcagcagcactatcaagctgcgcagcggcgacggtattcactttacctacaaaggtcagaaagccatcgctgacacggtatttgatctgattaaatttaatgctgcgccggaggaaaccccggcgcagcaggaaaaaacagaaacacatgatgaaacaacaaaaacgcccgtcgtggcaccttaaactggccggtgcgggagccctgtttgccgcagcgctctccctgctctcctgccagaacgatgcggataagccgtggatacagccgcagacaccaccgccggtgtcgcgtaatgatctgaccaactacggcgatccgaacctcagccgcctggcacaccgcctgcgggatccgtccgcgcgtgtccatattgtccagattggcgattcccatacagcagcggattttttctccggcacgctgcgtgacaaattccaggcgcgttacggcaacgcggggatcggctttgtgccgccgagcattatcgccggacagcgcacggcaaactttgtcttcaccgagccgaaaaaacagtggtcattcctgaccagccggaaagatgatgcaccaaacttcccgctgggcggttttgttatttcgccgctgacctcacacagcaccctgaccatgaaagagcgcaatccgtcctcttatcagtatgatatgcaggtgctgtaccagaccggctacccggcctccgttacggtacgcggcggcaaaggcggcacgctgaacctggcaccgtcctcagagtggcgtttttctgacagtgtaccggtaaccttcccggcagaaatcaccgcgaatgagcagagcccgctgaatatcggcggctggtttatcacccgcaaccatccgggcgtgatgctctcgtctgtcggtatcaacggcgcgacaattgccatgacgggaaaatggcagccgcagtgggtgaataccctggcacagaccgatccggaaatggtgatcctggcttacggtaccaatgaagcctttaatgacacgctggatttggatctctaccgtcagcagctgaccaatgtggtgcgcagtatccgcagcaacatgccggatgcggtgatcctgctggtcggcccgggtgacagtatcaagaacaaaaccgcgcctgactgccgctcacagcagcctgccaatctgcacaatgtcatgcggattcagcagtctgtggcgaaaagtgaaggtctgctctactgggactggcagcagttcatgggcggcgactgtgcaatcaacagctgggtactgcgtgacctggcacggccggacaaagtccatctctccggtccgggttatgaaaagagcgcaacagcactctataacgcgctggaatctctcctcagccagtagtaacaggttatccgcagataagctgattatctgcggatcctctcccctcagcagtttacgctgtgtcccagcacaccgatcatggcattctcattcacaaactgaatcattccgttgtctttatcagtcagctccagcgctttgtcatcctctgacggcaccacaatgataaaacggctgccgttgcgctccgcattcttgcggcaggtactgatccgcatccccgagcagtcatttttaatggtgaaatgcgggaacagtatccgcagacggcggccgaccatcagcgcatgcccggcggcacgggtgttttccgggatcagcaccacatcggtcgcattctgacgcagcagttgcttgtgacatttgcggatcaggaaaataatcgggtcgagcataaacgcaaaaccgctgaccgccacctgtttatccagcagatgcgacgcactggcatcataacggccgccgcggcataacagctcatcgtggctgtcaggatgcgtggtgcgccattcaaacagggtgtgacagtaattattcaccggatacagtcccggcgtcacactgtacggaattttcaggcggttgagggattcgagcaactgacggaagcgggcggcggaagcctcagagagaaactcactgagccggggcgcttttttattaacgatatccagcagcttgtgcggtatggataataactgctccggtttctctttcagtttaaccagccacggctcctcaaagaatggcagaaacggctgataatactctctcagtgcctgacgaaaccggctgaattcttcttcgctgccggcggtatttatttttaattcaatgtacggcgtaaggtgtaatgaactgaaaaaatcatactgcattaaaatatgttccagctcgatatcaatattatcgtagccgaatgcttccacaccgatctggtgatattgttcaaaatcctgtttctgcccggccacattccggaacatcgcaccgatataccataatttgctttttgactgtaaacgctgatgctgtgcgatcacccgcagacaacccatcgtcccctcaccgcgcagcagtgccggatggctgcagttgagtttgggaccgttatggttatcatccgcgaatgccgcggcattcttcatatggtcatcccagtattccagcaccggaaagcggatctcctgataacagtagcgtgccagcagcttagaggcgcggttttccagccagatccagtccgccacatcattactgtaatgtttgcgcggccgtccgctctgatgcgggcgtactgtccggtttacttcaaattccagtttctggcaatactgattggtgcccagcacgcaattctgattcagacagatttgaatacgctcaataacagactggctgatagtggtatataaaaaatgctgataatggatcccgcgctcttccggtgttttacctaattgcaaataacactgatgttcagtcattctcggaatagtgcattccccggtgttatgaccgtaacttgaataatttaagttatgtttatcattatattccgactggtcggatgtgaatgtatcaacatattgagagactaaaagaaaataggagtttgcttcaataaggcagctgttataacgccggtcccataatgccccggtacgctgatatttattattgtagtaaggaacatactggcgtccgatgtgctgtataaagcggcttaaatcttcttttgattttggtgtcagcagcaacaataccgtatctgcctgaagtgaataggcatgaagctcgcaattgtatgattctaaagacctgtccacacaggtcaggaagcgggcgtaatcattctcttcctgaaagagtttttcatgattgtgtccgttaagtttaatcagctgtggtaatcccgggaaataaaggcgctctcttcttggcataggtcagcgctccaatcgctaaaaataataaatttatctaatgagtaatataatataaaaccggttttattattttaactcatatcataaaacccgtttttatttttgaatgccattcttttttatcgtattgaaaaaagtatatttattttttacttacctgctttgttaattaacatatgacaaaagtaaaataataaccacacaagaagtccgattattcacgtcaaaaaagggggacagagtcacttactgcaaaacggcacataaaatattcattttcagctgaaactgttatagaagcgctgttttttttgatcgatatcaaatttagaacgacatttaaaaattaagtttcccgtatctcggtaattgtcatcgggtgcacctttccaattaaacaatcattacaggaaaagcattatgggaaacatgagtgccagttccgcccataaaatgggggtggtcgcgctgaccctggtaaccgcatcaaatatgatgggttccggtgtgttcatgctgccgactaacctcgcgggcgtcggttacatctccttatggggatggttatttacaatcattggtgttatcgcattagccttagttttcgccaaaaccagtcttatcacaccgcgtaacggcggtatcgtggcttacgccagcgatgctttcggtccgtttatcggtttccagaccactgtctgttactggatcagtgcctgggtcggtaacgtcgcgctgctggttgccggtgtcggttacctcagctacttcttccctgaactgaaaaaccctgctatcggcagcgtcgttgctatcgcgattctgtggggcttcgtggtattagccagtttcggtgcccgtgtcgccggtcgtgcgcagtcattcactgcaagctgcatgctggttgttgttctgggtgtcggtgtcatcggctggttctggttcgatccgcagatgtttactcaggtttataacggtaccggtaaaagcgataccactgccattatcactgcggcatctatcgcgctgtggggcttcctgggtgttgaatctgctgtggtttccagcggccaggtggacaaaccggaatacactgtaccgcgtgcaaccgtttatggtctgctgattgcgtcagtctgctacgtcggcagctgcaccgttatcatgggtctggttccgcacgaagaactggttaactctgctgcgccgtttgcggatgctgcccgttacatgttcggtgaaactgccggtactgttgcctctatcctgagtatcatcgcctgcttcggttctatctccggctggttaatcctgcagtctgaaggtccgcgtgccggtgcaaaccagggtctgttccctaaattcttctccgatgtgaacaaaaatgacgttccgatgaaaagcctgattttcaccggtgtgctgatgagcctggtgctgttaatgaccgcatcaccaaacctggccaaacagttcgaaatcgtcattctgatgtctgtcttcgcatctctgctgccatacatgtatgcactgatttctctgccaatcatcatggtttccaaaaaaatgaaccgcggcagcaccttcattttctataacgtcctggtggttatcggcattatctactgtgtctttgccctgttaggttccggttctgattctatgttctggggtctggtcatgatgtcaatcactatcccgctgttcagcttcgtggccgccggccgtgcgaaaaaaggcaacgagattctgtacatcaacgacgaacaaaacaaagcgtgatcagctccgcttcacagtcttaacttttgaaaaacaagaggtaattaagtatgactctgtctatcaatgatcaaaacaaacttgatgcattctgggcttattgcgtaaaaaaccagtatttcaacatcggctatcctgaatcagcggatttcgattacaccaacctggaacgtttcttacgtttctccatcaacaactgcggtgactggggcgaatattgcaactacctgctgaactctttcgatttcgagaaagaagtgatggagtatttcgcagacctgttcaaaattccgtttgaacaaagctggggttatgtgaccaacggcggtactgaaggtaacatgttcggttgctacctgggccgtgaaatcttccctgacggtaccctgtactattcaaaagatactcactattccgttgcgaaaatcgttaaattactgcgtatcaaatctcaggttgttgaatctctgccaaacggcgaaatcgactatgacgatctgatgaaaaaaatcgctgacgataaagaagcgcatccgatcattttcgctaacatcggtaccactgtccgcggtgctattgatgatatcgctgaaatccagaaacgcctgaaagcagccggtatcaaacgtgaagattactacctgcacgctgatgcggcactgagcggcatgatcctgccattcgttgatgatgcacagccattcacgtttgctgacggtatcgactcaatcggtgtttccggccataaaatgattggttcgccaatcccttgcggtatcgttgttgcgaagaaagaaaacgtggatcgtatttctgttgaaatcgactacatctccgcacacgacaaaaccatcaccggttcacgtaacggtcacacaccactgatgctgtgggaagctatccgttcacattcaactgaggaatggaaacgccgcatcacccgcagtctggatatggctcagtacgctgttgaccgtatgcagaaagccggtatcaatgcatggcgcaacaaaaactccatcactgttgtgttcccttgcccgtcagaacgcgtctggagagaacattgcctggcaacgtccggcgacgtggctcacctgatcaccaccgcgcaccatctggataccgcgcagatcgacaaactgatcgacgacgttatcgcggattttaacttacacgcggcataaaaaaaggcagtggtaattatccactgcccccttacggttcgttgccggcgcagacgccaatcctgccggcaacgctctctaacctatacagcgacacaggatgatgcaagaaaaaagaccaaaaaacacggctcagttctctgatcgtgagattttttgctccctcatccgcagctggagtatttctgtgaggacaaaatggtatggttcccaatggtaaatccacccaccgcatgggcctgacagccctgatcattatgacggcttccaatatgatgggaagcggcgtgtttatgttaccctcctccctcgcgcatatcggttccatcgcgctgtggggcggactgctgaccttctgcggcgtactggcactggcgctggtgttcgccaagaccggtgaaatctccccctgtaaaggcggtgtgattgccaatatcggacggacattcgggcagtatatcgggttacagacatcacttttttactggctttcgacctggataggcaactgtgccttactgatctccggtgtcggttatctctcttatttctttccgcagcttcacactccgctttacgccgctattaccgcaattattattctctgggctttcgttctgctgggtttgcagggcgcaaaagtcgtcggctatgcgcagatttttaccggcctttgtatgctcaccgttattctgagcatcagtattttcggctggaccagttttgattacacacgttatatcaccagttttaatgttactcagaccagtaacacagatgctatttttgccgccgccgcgatttcgctgtggggctatctgggaattgaatccgcgtcggtttcatccgcccaggtgactaatccgcaccgcaatattccgctggcaaccattatcgggctggttattgctgccgcctgctatctcagttccaccaatgtcatgatggggatcctgccccacgaacagcttgttaactccaccgcaccgtttgctgataccgcccgttatctgtggggcgaacatgcgggacagattatctctgcgctcgcgattattgcctgcttcggtgcattaccgggctggcagattttacagactgaagttccccgctctgcggcggaagaaggcacattcccgcgtttttttgctgatgtgaaccgccacggcgtgccgtataaagggctgatttgtaccgccgggatgatgagcgccgtgctgctgctcaccatctcaccaagcctggaacagcagttccgcaacatcattattcttgcggtgtccgccagtctgatcccgtatgcgtttgctgtgatttccctgccgatcgccatgatcgcaaaaaaaatgcagtacgggcgcacctttattatttacgccactctgagcctgattggtctgggattcattatggtcgcgctgacaggcgccggcaccaaaccgctgttctggggcatggtgctgcagatgtttaccattccgctgtatctgttttttattatgcgccgcgaaaaaaacactactgatccccgtcccgggctcgccctgtcgtacatcccggggatctgcgctgagcagaccgctgagatggcgttatcggctgacaatgatgacagccggaatttctcacagagaaactgtatatagaggactaaaaatggaaaagattcagtcaatcagagggatgagaagtgtgcttccggaagaaacaccggtctggcagtggctggaaaaccggatccggaatatcacttcccgctacggctatcaggaggtcaggctgccgattctggaaccggttgccctgtttgagcgcgcggtcggtgaatccaccgatatcgtctcaaaagagatgtataacttcctcgataaaagcggcgagcacatcaccctgcgcccggaaggtaccagtggttgcgtccggaccgtgattgagaacaacatgtgctacaacaccacgcagcgcctgtggtatcagggcccgatgttccgttatgagcgtccgcagaaaggccgtctgcgtcagttcactcagttcggggtggaaaccttcggcatgccgggggcggatgtggatgcagagcttatctttatggtgaaagatatctttaaggcgctcggcgtggataaacacgtccgccttgagattaactccctcgggacaccggaagagcgctcagagcaccgtcagcagctggtgaattactttatgcagcacaaagcgctgctggatgaggacagcctgcgccgtctggaaaccaacccgctgcgtatcctggacagcaaaaacccggatatgcaggagatgattgaagcagcaccgcgcctgctggacttcctcggtgaggaatcacagcagcactttgatgatctgcgccgtctgctggacagtgaaaatattgcttatgtggtcaacccgcgtctggtccgcggactggattactacacccgtaccgtatttgagtggatcacggaagagctgggttcacaggggacagtctgcggcggtggccgttacgatggtctggttgaattgttcagcggcaaacagttaccggcttccgggtttgctatcgggatcgaacggctgttactgctgatccagactctcggcctggataaagatattgtgaatcagccggatattgtggtgacttatgaagatccggcacagaatgtggaagcgctgttactggctaacacactgcgccatcagttgccgcaatataaaatcctcaatgatttcaccagtgccaaactgaagcgtcagcacagcaatgcgctgaaatccggctgccgttacatcgtgacgctcaaccgtgacggccaggtcggcctgtgggatctggcggcgaacaccaatgaaaccctcaccgcagacaccctcgccaatgcgtttctgaataaaaccatcactgcgatggcctgataaacagcaacgtaatataaacaaaagcactgtttttacagtgcttttttgctttcaggcttttaccgtaaagtggaaatgataaaaatcactgcggcagatagccgtaccgtactccagcaccctgcccagcttgtcgcggcttctgaggataattttcatcagtgaggctgtcggcggaatagaaagcagttttgcctcctccgcggtcgggtgacagatagagagagcatattcctgcacatccggctcaattccctgcgccagccagtgcgcatacagagaaccgtccagcagatcaggacgcggcagaaacgcctccgggataaacatggtttccagcgagaccggaatatcatccaccagccggacacgtttgatcaccgccatcgtatcacctgcggataattccagttccggggccagtgagtccggcacagagtccagctgacgaataagccagcggttggacaccttgccgctgccggcggcctgcgcggaaaaaccgccgccggacaggttgtactgcaccggcagattaatctgcgtgcctttgccgtgatgtttcaccaccaggccctgtttcagcagtaagtccagtgccttcaccaccgtaacgcgggatacccccagcgactgcgacaaacggcgttcagacggcagaacacaaccgtgcgtcagctgcttttgtgtgatggcttcttcaatcccttgttttagctgaagatataacggaacagttgattgctgatcaagcctgtgctgtaaaaaagtgagaaaatcatgttccacaaataggttcctgtcatgctgcggataacggctgaaaacagtgtagcaacttttgtgtccgctatcacatactgattaaaatcaatccaactggactacaactggacttatttgtcgtctattatatactctataaagacaaaggctccacagcagttttataccaataatatgatttgttgttcttaattcattcaacaccagttcagataataataaatgacacaatcagcagcagtcccgttaaatgtgacagaaaaacgtattctcggttgtctttacgggcaggcaaccggggacgccatgggcatgccgtcggaactctggccgaagagccgggtccgtcagcacttcggctggattgatactttcctgccggggcctgaggagaatattgccgccaacgagtttgttgccggggaatttaccgatgacaccagtcagtgtgttgccctgatggatgccattattgaggagcacggtgctgtcgtcccgcagacgatcgcccgtcacataatggcgtgggccacccggataaacgcgtttgaaaaaaatattctggggccgacatcaaaagctgcgctgaatgccatacaccagggaatacctttagataaaatagaggcaaatggtgtgaccaacggttccgcgatgcgtgtcgcgcccgtcggttgcctgatgccatcatataatacagatcgttttattgagcaggtcaggctctcctgtctgccgacccacaaatccgatatcgccattgccggtgctgttgtgattgcgcgggccgttagtctggctgttgagggcactgactggtctgcgataaaacaggctgtcataccgctggctgacactgttcagcgccggtttgagtccaccttcagcccattgctgggacggaggattatgtacgccctcaatgtggtccgcgggcgcacggacgaagagcaggcactgaccgatctctatgagatagtcggcgccggtatggataatattgagtctatcccgtgtgcaattgcactcgcggatttagccaacaccaatcccgtacgctgtgcggtactggctgcaaatctcggcggcgacacggacaccatcggtg
